(19) United States
(12) Patent Application Publication
(10) Pub. No.: US 2008/0181896 A1
(43) Pub. Date: Jul. 31, 2008

(54) Selections of genes and methods of using the same for diagnosis and for targeting the therapy of select cancers

(75) Inventors: Javed Khan, Derwood (GB); Markus Ringner, Lund (SE); Carsten Peterson, Lund (SE); Paul Meltzer, Rockville, MD (US)

Correspondence Address: NATIONAL INSTITUTES OF HEALTH, P. O. BOX 2903, MINNEAPOLIS, MN, 55402, US

(73) Assignees: GOVERNMENT OF THE UNITED STATES, REPRESENTED BY THE SECRETARY,; DEPARTMENT OF HEALTH AND HUMAN SERVICES, WASHINGTON, DC (US)

(21) Appl. No.: 11/981,502

(22) Filed: Oct. 30, 2007

Related U.S. Application Data
(63) Continuation of application No. 10/159,563, filed on May 31, 2002.
Application No. 10/159,563 is a continuation-in-part of application No. 10/133,937, filed on Apr. 25, 2002.

(51) Int. Cl. A61K 31/70; C12Q 1/68; A61K 39/00; G01N 33/574; C40B 60/12; A61P 43/00; C12M 1/00; A61K 38/00; A61K 39/395

(52) U.S. Cl. 424/138.1; 435/6; 424/277.1; 514/44; 514/2; 435/7.23; 435/287.2; 506/39

(57) ABSTRACT

A method of diagnosing a disease that includes obtaining experimental data on gene selections. The gene selection functions to characterize a cancer when the expression of that gene selection is compared to the identical selection from a noncancerous cell or a different type of cancer cell. The invention also includes a method of targeting at least one product of a gene that includes administration of a therapeutic agent. The invention also includes the use of a gene selection for diagnosing a cancer.

[0001] This application is a continuation in part of a U.S. patent application Ser. No. 10/133,937 entitled “METHODS FOR ANALYZING HIGH DIMENSIONAL DATA FOR CLASSIFYING, DIAGNOSING, PROGNOSTICATING, AND/OR PREDICTING DISEASES AND OTHER BIOLOGICAL STATES”, filed on Apr. 25, 2002.

### FIELD OF THE INVENTION

[0002] The invention relates generally to selections of genes expressed in a cancer cell that function to characterize a cancer, and methods of using the same for diagnosis and for targeting the therapy of select cancers. The invention also relates generally to the use of supervised pattern recognition methods to classify and diagnose disease. More specifically, the invention relates to the use of supervised pattern recognition methods, such as artificial neural networks for the classification, diagnosis, prognosis and prediction of disease using high dimensional data, such as gene expression profiling data.

### BACKGROUND OF THE INVENTION

[0003] Disease is generally diagnosed based on a myriad of factors, both objective and subjective, including but not limited to symptoms, laboratory test values, demographic factors and environmental factors. Diagnosis relies on a clinician such as a physician or a veterinarian being able to identify and evaluate the relevant factors. Often this task can be difficult, and becomes exceedingly more so as the number of factors to be considered increases.

[0004] An example of a disease whose diagnosis is difficult is tumors. Tumors are currently diagnosed on the basis of clinical presentation, routine histology, immunohistochemistry and electron microscopy. However the histological appearance may not reveal the genetic aberrations or underlying biologic processes that contribute to the malignancy. Monitoring global gene expression levels using DNA microarrays would provide an additional tool for elucidating tumor biology as well as the potential for molecular diagnostic classification of cancers. Several studies have demonstrated that gene expression profiling using DNA microarrays is able to classify tumors with a high accuracy, and discover new cancer classes.

[0005] A specific type of tumors which could benefit is the small, round blue cell tumors (SRBCTs) of childhood as a model. SRBCTs include, neuroblastoma (NB), rhabdomyosarcoma (RMS), Burkitt's lymphoma (also called Burkitt's) (BL) and the Ewing family of tumors (EWS), are so named because of their similar appearance on routine histology. However, accurate diagnosis of SRBCTs is essential because the treatment options, responses to therapy, and prognoses vary widely depending on the diagnosis. As their name implies, these cancers are difficult to distinguish by light microscopy, and currently no single test can precisely distinguish these cancers.

[0006] In clinical practice, several techniques are used for diagnosis, including immunohistochemistry, cytogenetics, interphase fluorescence in situ hybridization and reverse transcription (RT)-PCR. Immunohistochemistry allows the detection of protein expression, but it can only examine one protein at a time. Molecular techniques such as RT-PCR are used increasingly for diagnostic confirmation following the discovery of tumor-specific translocations such as EWS-FLI1; t(11;22)(q24;q12) in EWS, and the PAX3-FKHR; t(2;13)(q35;q14) in alveolar rhabdomyosarcoma (ARMS). However, molecular markers do not always provide a definitive diagnosis, as on occasion there is failure to detect the classical translocations, due to either technical difficulties or the presence of variant translocations.

[0007] An example of a diagnostic method replete with such problems is the diagnostic method for Ewing sarcoma. Ewing sarcoma is diagnosed by immunohistochemical evidence of MIC2 expression and lack of expression of the leukocyte common antigen CD45 (excluding lymphoma), muscle-specific actin or myogenin (excluding RMS). However, reliance on detection of MIC2 alone can lead to incorrect diagnosis as MIC2 expression occurs occasionally in other tumor types including RMS and BL.

[0008] One objective factor that can, in certain circumstances, be entirely predictive of a diseased state is the genetic makeup of the individual. Genetic makeup of an individual cell can also be considered in terms of the level of expression of the genes of that individual cell through gene expression data.

[0009] DNA microarray technology is a recently developed high throughput technology for monitoring gene expression at the transcription level. Its use is akin to performing tens of thousands of northern blots simultaneously, and has the potential for parallel integration of the expression levels of an entire genome. A DNA microarray consists of DNA probes immobilized on a solid support such as a glass microscope slide. The DNA probes can be double stranded cDNA or short (25 mers) or long (50-70 mers) oligonucleotides of known sequences. An ideal DNA microarray should be able to interrogate all of the genes expressed in an organism.

[0010] In DNA microarrays using cDNA, the probes are PCR amplified from plasmid cDNA clones that have been purified and robotically printed onto coated glass slides. DNA microarrays using oligonucleotide have an advantage over cDNA microarrays because physical clones are not necessary. The oligonucleotides can either be previously synthesized and printed on glass slides, or can be synthesized directly on the surface of silicon or glass slides. Several print-ready oligonucleotide (60-70 mers) sets are commercially available for human, mouse and other organisms (http://www.cgen.com, http://www.operon.com).

[0011] Another technique for fabricating oligonucleotides microarrays chemically synthesizes the oligonucleotides (25 mers) on a silicon surface using photolithography techniques. (Affymetrix Inc., Santa Clara, Calif.). Originally such arrays were designed to detect single-nucleotide mutations, but now have applications for gene expression profiling studies. Yet another technique delivers single nucleic acids, which ultimately form longer oligonucleotides (60 mers), by ink-jet onto glass surfaces.

[0012] One method of utilizing gene expression data from microarrays is given by Tusher et al., PNAS 98(9) p. 5116-21, April, 2001. The method of Tusher et al. is a statistical method titled Significance Analysis of Microarrays (“SAM”). The general approach in SAM is based on commonly used statistical tests, t-tests specifically, to find genes that discriminate between two classes in a gene-by-gene fashion. SAM uses replication of experiments to assign a significance to the discriminating genes in terms of a false discover rate. SAM therefore offers a method of choosing particular genes from a set of gene expression data, but does not offer a diagnosis based on those genes.

[0013] DNA microarrays would be an invaluable tool for disease diagnosis. Gene-expression profiling using DNA microarrays permits a simultaneous analysis of multiple markers, and can be used for example to categorize cancers into subgroups. The only limitation associated with the use of DNA microarrays is the vast amount of data generated thereby. A method that would allow for the easy and automated use of DNA microarray data in disease diagnosis is therefore desirable. Despite the many statistical techniques to analyze gene-expression data, none so far has been rigorously tested for their ability to accurately distinguish diseases belonging to several diagnostic categories. Such methods have also not been used to extract the genes or features that are the most important for the classification performance. Such genes would also generally be those that are of use to biologists and physicians as offering avenues to research in investigating cures.

[0014] However, these other methods have not been used to extract the genes or features that are most important for the classification performance and which also will be of interest to cancer biologists.

[0015] Therefore, there remains a need for a method of using gene expression data to diagnose, predict, or prognosticate about a disease condition.

### SUMMARY OF THE INVENTION

[0016] In accordance with one embodiment of the invention, there is provided a selection of genes, expressed in a cancer cell, that functions to characterize the cancer when the expression of a gene selection from the cancer cell is compared to the expression of an identical selection of genes from a noncancerous cell or an identical selection of genes from a different type of cancer cell.

[0017] Another embodiment of the invention includes a method of targeting a product of at least one of the genes in table 5 (below) that includes administering a therapeutic agent. Another embodiment of the invention includes a method of targeting a product of at least one of the genes in tables 2, 6, 7, 8, or 9 (below) that includes administering a therapeutic agent having an effect on said gene product. Yet another embodiment of the invention includes a method of targeting a product of at least one of the genes in table 10 (below) that includes administering a therapeutic agent having an effect on said gene product.

[0018] Another embodiment of the invention includes a method of using a selection of genes expressed in a cell having a particular type of cancer, wherein the gene selection functions to characterize the particular type of cancer when the expression of the gene selection from the cell is compared to the expression of an identical selection of genes from a cell without that particular type of cancer for diagnosing the particular type of cancer. Devices for carrying out the above methods of the invention are also included within the scope of the invention.

[0019] Another embodiment of the invention provides a method of diagnosing, predicting, and/or prognosticating about a disease including obtaining experimental data, wherein the experimental data includes high dimensional data, filtering noise from the data, reducing the dimensionality of the data by using one or more methods of analysis, training a supervised pattern recognition and/or classification method, ranking individual data from the overall data based on the relevance of the individual data to the diagnosis, prediction, prognosis or classification, choosing multiple individual data members, wherein the choice is based on the relative ranking of the individual data, and using the chosen data to determine if an unknown set of experimental data indicates a particular diseased condition, prognosis, prediction, or classification.

[0020] The invention offers a method of diagnostic classification of cancers from their gene-expression signatures and also identifies the genes that contributed to this classification. One embodiment of the method diagnoses SRBCTs of childhood, which occasionally present diagnostic difficulties.

[0021] The invention also offers a method of diagnosing, predicting, and/or prognosticating about SRBCTs including obtaining gene expression data, filtering noise from the gene expression data, reducing the dimensionality of the data by using principal component analysis (PCA), training an ANN, ranking the individual genes from the gene expression data, choosing multiple genes from the gene expression data, wherein the choice is based on the relative ranking of the individual genes and using the chosen genes to determine if an unknown set of gene expression data indicates a particular diseased condition, prognosis, and/or a prediction.

[0022] Methods of the invention can be utilized in a number of different applications. For example, diagnostic chips can be fabricated based on the identification of the diagnostic genes. Such chips would be very useful in clinical settings, as it would allow clinicians to diagnose cancers from a relatively small set of genes instead of purchasing entire gene sets.

[0023] Methods of the invention can also be used to define which patients with the same types of cancers are likely to respond to treatment. This would allow a physician to intensify treatment for those with a more negative prognosis based on their gene expression profiles as detected utilizing a method of the invention.

[0024] Methods of the invention can also be used for identifying pharmaceutical targets. Pharmaceutical companies can utilize methods of the invention to determine which genes to target in efforts to target specific diseases.

[0025] Methods of the invention can also be utilized as a research tool for analyzing all types of gene expression data including cDNA and oligonucleotide microarray data.

[0026] Methods of the invention can also be utilized to identify and rank, by importance, the genes that contribute to a diagnosis. A minimal set of genes that can correctly classify and identify diagnostic categories can also be determined using methods of the invention.

[0027] Methods of the invention identify the most significant genes, by calculating the sensitivity of the classification to a change in the expression level of each gene. A list of genes, ranked by their significance to the classification, is produced thereby. In an embodiment of the invention utilized for classifying SRBCTs the most important 96 genes reduced the misclassifications to zero. This allows for cost effective fabrication of SRBCT subarrays for diagnostic use. When a method of the invention used the 96 genes on 25 unknown samples, all 20 samples of SRBCTs and 5 non-SRBCTs were correctly classified.

[0028] One embodiment of the invention calibrates ANN models on the expression profiles of 63 SRBCTs of 4 diagnostic categories. Preferred embodiments of the invention utilize linear (that is no hidden layers) ANN models because of the high performance achieved. Methods of the invention may utilize other linear methods as well, and methods of the invention can easily accommodate nonlinear features of expression data if required. Hidden layers will be utilized for non linear data. Preferably, both tumor samples and cell line samples are used in order to compensate for heterogeneity within unknown samples (which contain both malignant and stromal cells) based on possible artifacts due to growth of cell lines in tissue culture.

[0029] Data from such samples is complementary, because tumor tissue, though complex, provides a gene-expression pattern representative of tumor growth in vivo, while cell lines contain a uniform malignant population without stromal contamination. Despite using only neuroblastoma (NB) cell lines for calibrating the ANN models, all four NB tumors among the test samples were correctly diagnosed with high confidence. This not only demonstrates the high similarity of NB cell lines to the tumors of origin, but also validates the use of cell lines for ANN calibration. One embodiment of a method of the invention accurately classified all 63 training SRBCTs and showed no evidence of over-training, thereby demonstrating the robustness of this method.

### BRIEF DESCRIPTION OF THE FIGURES

[0030] FIG. 1 illustrates a process flow for a method to classify and diagnose diseases using artificial neural networks according to one embodiment of the invention.

[0031] FIG. 2 illustrates a general purpose computing system utilized as part of an artificial neural network according to another embodiment of the invention.

[0032] FIG. 3 illustrates a set of processing modules making up an embodiment of an artificial neural network according to the invention.

[0033] FIG. 4 represents a plot of the average classification error per sample (using a summed square error function) plotted during the training iterations (epochs) for both the training and validation samples.

[0034] FIG. 5 represents a plot of the average number of misclassified samples for all 3750 models plotted against an increasing number of used genes.

[0035] FIG. 6 represents a plot of the distance from the samples committee vote to the ideal vote for that diagnostic category.

[0036] FIG. 7 represents two projections of the MDS plot of the training samples.

[0037] FIG. 8 represents a hierarchical clustering of the samples and genes, where each row represents one of the 96 cDNA clones, and each column represents a separate sample.

[0038] FIG. 9 represents a hierarchical clustering dendrogram of the samples in FIG. 8.

### DETAILED DESCRIPTION OF THE PREFERRED EMBODIMENTS

[0039] The invention is a method of classifying, diagnosing, prognosticating about, and predicting disease conditions or other biological states using supervised pattern recognition methods to analyze high dimensional data.

[0040] One embodiment of the invention is illustrated in FIG. 1. This process flow describes an embodiment of the method that includes obtaining experimental data 101, filtering the data 102, reducing the dimensionality of the data 103, setting up a validation method 115, training a supervised pattern recognition method 111, validating the outcome of the supervised pattern recognition method 112, and once the supervised pattern recognition method is validated, ranking the data based on the outcome of the supervised pattern recognition method 113. Further detail and more specific embodiments of methods of the invention are described below.

[0041] Any diagnostic categories can be diagnosed using the technology described here. It includes distinguishing patients with multiple sclerosis, rheumatoid arthritis, and other inflammatory or autoimmune diseases. It may also diagnose other systemic diseases based on gene expression profiles of white cells, including infections with particular organisms, cancer, or myocardial infarctions.

### Obtaining Experimental Data

[0042] The first step in methods of the invention is to obtain experimental data. Experimental data utilized in methods of the invention is high dimensional data. High dimensional data is data that has at least hundreds of individual pieces of information associated with one sample. An example of high dimensional data useful in methods of the invention is gene expression data. Gene expression data is high dimensional data because each sample or person has a large number of gene expression levels. Generally speaking, gene expression data generally has thousands of gene expression levels for each sample. Other examples of high dimensional data useful in the invention include but are not limited to protein arrays and protein chips, cell array based expression analysis, analysis of patterns of single nucleotide polymorphisms in disease conditions, and comparative genomic hybridization on methaphase, BAC genomic, cDNA and oligonucleotide arrays.

[0043] Preferably, the gene expression data is obtained through use of DNA microarray technology. DNA microarrays are preferred as a source of data because they generally offer a more complete picture of the interactions of a large number of genes with a limited number, or even one experiment. An example of a general description of how gene expression data can be obtained by using cDNA microarray technology is given below.

[0044] DNA microarrays, although a relatively new technology, have already been saddled with a number of different names, biochip, DNA chip, gene chip, genome chip, cDNA microarray, and gene array. The use of any of these terms herein refers generally to DNA microarrays. The underlying principle of DNA microarrays is base pairing or hybridization i.e., A-T and G-C for DNA, and A-U and G-C for RNA.

[0045] DNA microarrays provide a medium for matching known and unknown DNA samples based on the base pairings given above. DNA microarrays can either be fabricated by high-speed robotics or can be fabricated in a laboratory setting. They are generally patterned on glass, but can also be fabricated on nylon substrates. Microarrays generally have sample spot sizes of less than 200 μm diameter, and generally contain thousands of DNA spots on one microarray.

[0046] One method of fabricating cDNA microarrays begins by first producing gene-specific DNA by polymerase chain reaction (PCR) amplification of purified template plasmid DNAs from cloned expressed sequence tags (ESTs). The PCR product is then purified, resuspended and printed onto a substrate. DNA microarrays are also commercially available from a number of sources, including but not limited to Affymetric, Inc. (Santa Clara, Calif.), Agilent Technologies (Palo Alto, Calif.), and Research Genetics (Huntsville, Ala.).

[0047] One general procedure for a cDNA microarray experiment begins by preparing DNA samples and arraying them (either with an arraying robot, or by hand), to form a DNA microarray. Next, the RNA samples are extracted from the cells of interest, purified, reverse transcribed into cDNA and differentially fluorescently labeled to create probes. Then, the fluorescently labeled cDNA probes are hybridized to the cDNA microarray. If a probe contains a cDNA whose sequence is complementary to the DNA on a given spot, the cDNA probe will hybridize to that spot. After the cDNA probes are hybridized to the array, and any loose probe has been washed away, the microarray is imaged to determine how much of each probe is hybridized to each spot. This indicates how much of each gene from the microarray is expressed in the two samples. If the amount of starting material is small, for example from needle biopsies, the RNA can first be subject to amplification by modified Eberwine methods as described by Gelder et al. (Amplified RNA synthesized from limited quantities of heterogeneous cDNA.Proc Natl Acad Sci U S A 1990 Mar;87(5):1663-7).The experimental high dimensional data, preferably obtained from gene expression experiments, preferably performed using cDNA microarrays, is then further analyzed by a method of the invention.

### Filtering the Data

[0048] The next step in a method of the invention is filtering the data 102 to remove individual pieces of data that are deemed undesirable. This filtering step functions to eliminate weak and/or problematic data from further use in the method. Accomplishment of the step of filtering depends greatly on the type of high dimensional data utilized. Any method known to those of ordinary skill in the art can be used to eliminate data determined to be undesirable.

[0049] One basis for carrying out this filtering, if a DNA microarray is being utilized for obtaining the high dimensional data, is the intensity of the fluorescence from the individual microarray spots. This basis of omitting data is based on failure or error in the imaging of the specific spots. A preferred method of performing initial data filtering on cDNA microarray data to remove those spots where imaging was a problem is to utilize the intensity of the various spots and utilize only those spots that have an intensity over a certain threshold value. Other methods of filtering DNA microarray data include but are not limited to eliminating spots in which the number of pixels represented is less than a threshold defined by the user, eliminating spots in which the standard deviation of the signal on the spots is too large, as defined by the user, eliminating spots in which the background intensity of a single spot is too high, or any combination thereof. In addition quality values based on intensity, can be assigned to each spot, standard deviation of intensity, background and/or size of each spot, then a spot could be eliminated if its quality value falls below a threshold as defined by the user.

### Reducing the Dimensionality of the Data

[0050] The next step in methods of the invention is reducing the dimensionality of the data 103. The number of samples needed to calibrate a classifier with good predictive ability, depends critically on the number of features used in the design of the classifier. In the case of high-dimensional data, such as microarray data, where the number of samples is much smaller than the number of individual pieces of data there exists a large risk of over-fitting. There are two different solutions to this problem. First, the calibration process can be carefully monitored using a cross-validation scheme to avoid over-fitting (see below). Second, the dimension of the data can be reduced, either by using a dimensional reduction algorithm or by selecting a smaller set of data for input to the supervised pattern recognition method. Dimensionality reduction allows the number of parameters representing each sample to be reduced. This allows for the design of a classifier that has less risk of over-fitting, thereby increasing its predictive ability. Examples of methods of reducing the dimensionality of the data include but are not limited to principal component analysis (PCA), weighted gene analysis, t-test, rank based Wilcoxon or Mann-Whitney tests, signal-to-noise statistic, Fisher's discriminant analysis, or ANOVA tests.

[0051] In a preferred embodiment of the invention, PCA is used to reduce the dimensionality of the data.

[0052] In the case of PCA on gene expression data, reduction of the dimensionality is achieved by rotating gene expression space, such that the variance of the expression is dominated by as few linear combinations of genes as possible. Even though the formal dimension of the problem is given by the number of individual data points, the effective dimension is just one less than the number of samples. Hence the eigenvalue problem underlying PCA can be solved without diagonalizing 2308×2308 matrices by using singular value decomposition. Thus each sample is represented by 88 numbers, which are the results of projections of the data using the PCA eigenvectors.

[0053] A potential risk when using PCA on relatively few samples is that components might be singled out due to strong noise in the data. It could be argued that the outputs (labels) should be included in the dimensional reduction, using e.g. the Partial Least Squares (PLS) algorithm, in order to promote components with strong relevance for the output. However, based on explorations with similar data sets, this is not optimal; bias is introduced and implicitly “over-trains” from the outset by including the outputs in the procedure.

### Setting Up a Validation Method for the Supervised Pattern Recognition Method

[0054] Once the data has been filtered 102 and its dimensionality reduced 103, a validation method is set up for monitoring and validating the training of the supervised pattern recognition method 115. Any method commonly used by those of skill in the art for validating the training of a supervised pattern recognition method can be used.

[0055] In one embodiment, the first step in setting us a validation method is to randomly divide the data into three groups of data, 105, 106, and 107. Then, one of those groups is chosen as a validation group 108. The first two of the groups 105 and 106 are combined into a training group 109, which is used to train the supervised pattern recognition method 111 and the third group 107 is used to validate the performance of the supervised pattern recognition method 111, once trained, and is called a validation group 110.

[0056] In this specific preferred embodiment, the 3-fold cross validation procedure (steps 104 through 110) is performed on all of the samples. A data group having 63 samples is given as an example. The 63 known (labeled) samples are randomly shuffled 104 and split into 3 equally sized groups (105, 106, and 107). The supervised pattern recognition method 111 is then calibrated as discussed below using the training group 109. The third group, a validation group 110, is reserved for testing predictions. Comparisons with the known answers refer to the results from the validation group 110 (i.e. when using a model, the samples used for training the model are never used in predictions). This procedure is repeated 3 times, each time with a different group used for validation. The random shuffling 104 is done about 100 to 10000 times. For each shuffling, one supervised pattern recognition method 111 model is generated. Thus, in total each sample belongs to a validation group 110, 1250 times and 3750 supervised pattern recognition methods 111 have been calibrated.

### Training the Supervised Pattern Recognition Method

[0057] The supervised pattern recognition method 111 is then trained. The specific method of training the supervised pattern recognition method 111 is dependent on the specific form that the supervised pattern recognition method 111 takes. The choice of the supervised pattern recognition method 111 and the training thereof is well within one of skill in the art, having read this specification.

[0058] One example of a supervised pattern recognition method is an artificial neural network (ANN). ANNs are computer-based algorithms that are modeled on the structure and behavior of neurons in the human brain and can be trained to recognize and categorize complex patterns. Pattern recognition is achieved by adjusting parameters of the ANN by a process of error minimization through learning from experience. They can be calibrated using any type of input data, such as gene-expression levels generated by cDNA microarrays, and the output can be grouped into any given number of categories. ANNs have been recently applied to clinical problems such as diagnosing myocardial infarcts and arrhythmias from electrocardiograms and interpreting radiographs and magnetic resonance images. However, ANNs have not been used to decipher gene-expression signatures of SRBCTs or for diagnostic classification.

[0059] In embodiments where an artificial neural network (ANN) is employed as the supervised pattern recognition method 111, calibration is preferably performed using JETNET (C. Peterson, T. Roegnvaldsson and L. Loennblad, “JETNET 3.0—A versatile artificial neural network package,” Computer Physics Communications 81, 185-220 (1994)). Preferably, the software is used with a learning rate η=0.7, momentum coefficient p=0.3 and the learning rate is decreased with a factor 0.99 after each iteration. Initial weight values are chosen randomly from [−r, r], where r=0.1/maxᵢ Fᵢ and the “fanin” Fᵢ is the number of nodes connecting to node i. The calibration is performed using a training set and it is monitored both for the training set and a validation set, which is not subject to calibration (see below). The weight values are updated after every 10 samples and the calibration is terminated after 100 passes (epochs) through the entire training set. In one embodiment of a method of the invention, the resulting parameters for the completed training of a supervised pattern recognition method 111 defines a “model”.

[0060] In preferred embodiments, due to the limited amount of calibration data and the fact that four output nodes are needed (Ewing's sarcoma (EWS), Burkitt's lymphoma (BL), neuroblastoma (NB) and rhabdomyo sarcoma (RMS)), linear perceptrons (LP) with 10 input nodes representing the PCA components described above are utilized. In other words, the supervised pattern recognition method 111 generally contains 44 parameters including four threshold units. Since 10 components could be used without risking “over-training” the optimization of the number of components to a smaller number is generally not necessary.

[0061] The possibility of using all the PCA components as inputs followed by a subsequent pruning of weights to avoid “over-fitting” is also one alternative. This resulted in the dominant 4-8 PCA components (depending on the composition of the training set 107) being the surviving inputs. Generally, the less dominant PCA components contain variance not related to separating the four cancers, but rather to, for example, experimental conditions (noise) or variance related to sub-groupings within a cancer type.

### Verifying the Outcome of the Supervised Pattern Recognition Method

[0062] Once the supervised pattern recognition method 111 is trained, the next step is to determine whether the validation of the supervised pattern recognition method 111 is successful 112. This step determines whether the supervised pattern recognition method 111 adequately predicted the results for the validation data set 110 using any number of performance measurements and error measurements.

[0063] Any method known to those of ordinary skill in the art can be utilized to evaluate the performance of the training of the supervised pattern recognition method 111. Generally speaking, the performance is evaluated by comparison with some predetermined level of correct predictions that the user has determined is acceptable.

[0064] If the performance of the supervised pattern recognition method 111 is sufficiently poor, and a measure of error is greater than an allowable threshold, the processing may return to module 103 where the dimensionality of the data is reduced in a different manner and the entire training and validation process is repeated.

### Ranking the Data

[0065] Once module 112 determines that the network 111 has been adequately trained, the processing proceeds to rank the output of the supervised pattern recognition method 113.

[0066] The outcome of the supervised pattern recognition method 111 can be looked at either independently or in a compiled form. Each supervised pattern recognition method 111 gives a number between 0 (not this disease type) and 1 (this disease type) as an output for each disease type. If the predictions are viewed independently, the maximal output is forced to 1 while the other outputs are forced to 0. Then it is determined how many of the predictions are correct. If the predictions are viewed in a compiled form, all of the predicted outputs are considered in their numerical form, after which all of the numbers are averaged and the resulting average is forced to 0 or 1.

[0067] In one embodiment of the method, the predictions, as compiled, are used to classify samples. For validation samples the compilation is based on 1250 models, while for additional unknown samples all 3750 models are used in the compilation.

[0068] In one embodiment, each sample is classified as belonging to the disease type corresponding to the largest average in the compilation. In addition, it is desirable to be able to reject the second largest vote as well as test samples that do not belong to any of the disease types. In order to reject those samples that do not belong, a distance d_{c} from a sample to the ideal vote for each disease type is defined as

$${d}_{c} = \frac{1}{2} {\sum }_{i = 1}^{4} {( {o}_{i} - {δ}_{i , c} )}^{2} \qquad ( 1 )$$

where c is a disease type, oᵢ is the average from the compilation for disease type i, and δ_{i,c} is unity if i corresponds to disease type c and zero otherwise. The distance is normalized such that the distance between two ideal samples belonging to different disease categories is unity. Based on the validation group, an empirical probability distribution of its distances is generated for each disease type.

[0069] The empirical probability distributions are preferably built using each supervised pattern recognition method 111 independently (not the average from the compilation). Thus, the number of entries in each distribution is given by 1250 multiplied by the number of samples belonging to the disease type. For a given test sample, the possible classifications based on these probability distributions can be rejected. This means that for each disease category a cutoff distance from an ideal sample is defined, within which, based on the validation samples, a sample of this category is expected to be. The distance given by the 95th percentile of the probability distribution is preferably chosen as a cutoff, which means that if a sample is outside of this cutoff distance it cannot be confidently diagnosed. It should be noted that the classification as well as the extraction of important genes (see below) converges using less than 100 supervised pattern recognition method 111 models. 3750 supervised pattern recognition method 111 models are preferred is because sufficient statistics exist for these empirical probability distributions.

[0070] For each disease category the sensitivity and specificity of the diagnosis may be calculated (see Table 1 below). Table 1 gives sensitivity, specificity and ROC curve areas for both validation and test samples. Both the sensitivity and the specificity are very high for all categories. It should be noted, that they generally depend on the kind of samples that are used as test samples.

TABLE 1

| Category | Sensitivity | Specificity | ROC curve area |
|---|---|---|---|
| EWS | 93% | 100% | 1.0 |
| BL | 100% | 100% | 1.0 |
| NB | 100% | 100% | 1.0 |
| RMS | 96% | 100% | 1.0 |

[0071] For example, in the case of SRBCT classification, using normal muscle samples as tests makes it harder to separate out RMS samples. If only samples from the four categories were used as blind distance cutoffs, it could easily have been designed such that both the sensitivity and the specificity would have been 100% for all diseases. However, it is preferred that the method is tested using a variety of blind tests. If it is desirable to improve rejection of for example normal muscle samples, one could incorporate them as a fifth category in the training process. However, using more samples of all four categories in the training is initially probably the best way to improve the diagnostic separation.

[0072] The Receiver Operator Characteristic (ROC) curve area is identical to another more intuitive and easily computed measure of discrimination: the probability that in a randomly chosen pair of samples, one belonging to and one not belonging to the disease category, the one belonging to the category is the one with the closest distance to the ideal for that particular category. Since the ROC curve areas are unity for all disease categories (see Table 1), it is possible to define cutoff distances such that both the sensitivity and the specificity are 100% for all diseases. However, based on the training and validation groups it is difficult to motivate such cutoff distances.

[0073] The next step in a method in accordance with the invention is to actually rank the data. This step can in principle be done in two ways; (1) model-independent and (2) model-dependent analysis respectively. Due to the relative small number of samples, the model-dependent analysis is preferred when using ANN models.

[0074] The sensitivity (S) of the outputs (o) with respect to any of the 2308 input variables (xₖ) is defined as:

$${S}_{k} = \frac{1}{{N}_{s}} \frac{1}{{N}_{o}} {\sum }_{s = 1}^{{N}_{s}} {\sum }_{i - 1}^{{N}_{o}} \vert \frac{δ {o}_{i}}{δ {x}_{k}} \vert \qquad ( 2 )$$

[0075] where Nₛ is the number of samples (63 or 88) and Nₒ is the number of outputs (4). The procedure for computing Sₖ involves a committee of 3750 models. In addition we have defined a sensitivity for each output i (Sᵢ), which is analogous to Eq. (2) but without the sum over outputs. Furthermore, a sensitivity can be defined for each sample (or subsets of samples) individually, by only using that sample(s) in the sum over samples in Eq. (2). For all these sensitivities the sign of the sensitivity has also been defined. The sign signals whether the largest contribution to the sensitivity stems from positive or negative terms. A positive sign implies that increasing the expression rate of the gene increases the possibility that the sample belongs to this cancer type, while a negative sign means that decreasing the expression rate of the gene increases the same possibility. In other words, the sign does not tell whether a gene is up- or down-regulated but if it is more or less expressed in this cancer type as compared to the others. This means the genes are ranked not only according to their importance for the total classification, but also according to their importance for the different disease categories separately. The genes are preferably given a total rank as well as a separate rank for each disease category. Based on these ranks each gene is classified according to which disease category it is highly expressed in.

[0076] In one embodiment, once ranked, a relevant set of data can be selected module 114 by minimizing the amount of data to be used to classify and identify a particular disease. In one embodiment, a pre-determined amount of data having the highest ranking are selected. Of course, other selection methods may be employed without deviating from the spirit and scope of the present invention as recited in the attached claims.

### Implementation of Methods of the Invention

[0077] In embodiments of the method in which the supervised pattern recognition method 111 is an artificial neural network, a general purpose computing system as depicted in FIG. 2 can be utilized. An exemplary ANN processing system 200 provides an artificial neural network that also receives experimental data to train the artificial neural network, to verify the output of an artificial neural network, and to identify relevant genes using the neural network.

[0078] Those of ordinary skill in the art will appreciate that the ANN processing system 200 may include many more components than those shown in FIG. 2. However, the components shown are sufficient to disclose an illustrative embodiment for practicing the present invention. As shown in FIG. 2, the ANN processing system 200 is connected to a WAN/LAN, or other communications network, via network interface unit 210. Those of ordinary skill in the art will appreciate that network interface unit 210 includes the necessary circuitry for connecting the ANN processing system 200 to a WAN/LAN, and is constructed for use with various communication protocols including the TCP/IP protocol. Typically, network interface unit 210 is a card contained within the ANN processing system 200.

[0079] The ANN processing system 200 also includes processing unit 212, video display adapter 214, and a mass memory, all connected via bus 222. The mass memory generally includes RAM 216, ROM 232, and one or more permanent mass storage devices, such as hard disk drive 228, a tape drive, CD-ROM/DVD-ROM drive 226, and/or a floppy disk drive. The mass memory stores operating system 220 for controlling the operation of ANN processing system 200. It will be appreciated that this component may comprise a general purpose server operating system as is known to those of ordinary skill in the art, such as UNIX, LINUX, MAC OS®, or Microsoft WINDOWS NT®. Basic input/output system (“BIOS”) 218 is also provided for controlling the low-level operation of ANN processing system 200.

[0080] The mass memory as described above illustrates another type of computer-readable media, namely computer storage media. Computer storage media may include volatile and nonvolatile, removable and non-removable media implemented in any method or technology for storage of information, such as computer readable instructions, data structures, program modules or other data. Examples of computer storage media include RAM, ROM, EEPROM, flash memory or other memory technology, CD-ROM, digital versatile disks (DVD) or other optical storage, magnetic cassettes, magnetic tape, magnetic disk storage or other magnetic storage devices, or any other medium which can be used to store the desired information and which can be accessed by a computing device.

[0081] The mass memory also stores program code and data for providing an ANN processing and network development. More specifically, the mass memory stores applications including ANN processing module 230, programs 234, and other applications 236. ANN processing module 230 includes computer executable instructions which, when executed by ANN processing system 200, performs the logic described above.

[0082] The ANN processing system 200 also comprises input/output interface 224 for communicating with external devices, such as a mouse, keyboard, scanner, or other input devices not shown in FIG. 2. Likewise, ANN processing system 200 may further comprise additional mass storage facilities such as CD-ROM/DVD-ROM drive 226 and hard disk drive 228. Hard disk drive 228 is utilized by ANN processing system 200 to store, among other things, application programs, databases, and program data used by ANN processing module 230. For example, customer databases, product databases, image databases, and relational databases may be stored. The operation and implementation of these databases is well known to those skilled in the art.

[0083] A set of processing modules making up an embodiment of an artificial neural network according to the invention is illustrated in FIG. 3. The artificial neural network disclosed herein corresponds to a generic neural network of no particular topology for the network of nodes contained therein. The neural network typically utilizes a form of competitive learning for the operation of the nodes within the network. Within competitive learning networks, a large number of data vectors are distributed in a highly dimensional space. These data vectors represent known values for experimental data that typically reflect a probability distribution of the input experimental data. From this probability distribution representation, predictions for unknown values for similar input data may be determined.

[0084] In all of these competitive learning networks, the networks are typically presented a set of input data that possesses a corresponding set of results data. From these data values, the network of nodes “learns” a relationship between the input data and its corresponding results data. In this process, the probability distribution relationship is estimated using the multi-dimensional network of nodes. This relationship is represented within a set of artificial neural network coefficients for a particular topology of nodes.

[0085] One skilled in the art will recognize that competitive learning networks include a nearly infinite number of network topologies that may be used to represent a particular probability distribution relationship without deviating from the spirit and scope of the present invention as recited within the attached claims. In addition, artificial neural networks may utilize various well-known algorithm architectures, including hard-competitive learning (i.e. “winner-take-all” learning), soft competitive learning without a fixed network dimensionality, and soft competitive learning with a fixed network dimensionality, to specify an artificial neural network according to the invention as recited within the attached claims. Each of these algorithm architectures represents the same probability distribution relationship; however each of the various algorithm architectures better optimize corresponding processing parameters, which are often mutually exclusive with each other. These parameters include error minimization or the minimization of an expected quantization error, entropy maximization for the reference vectors used within a network, and topology-preserving or feature mapping architectures that attempt to map high-dimensional inputs signals onto lower-dimensional structures in a manner that attempts to preserve similar relationships found within the original data within the post-mapping data. As such, any of these types of algorithm architectures may be used to construct an artificial neural network without deviating from the spirit and scope of the present invention as recited within the attached claims.

[0086] Now referring to FIG. 3, an artificial neural network processing system 301 comprises a learning module 311, a prediction module 321, and a database of network node coefficients 313. The learning module 311 is used with a set of experimental data 315 that possesses a corresponding set of experimental results 316 to generate a set of network node coefficients that represent a probability distribution relationship for the experimental data 315-experimental result 316 data set for a particular neural network topology and algorithm architecture. The learning module 311 includes a data learning input module 312 that receives the experimental data 315-experimental result 316 data set generated using the process described above. The learning module 311 also includes an ANN training module 313 that processes the experimental data 315-experimental result 316 data set to generate the coefficients used to specify the probability distribution relationship and an ANN coefficient storage module 314 for storing the coefficients that have been previous generated within the database 313 for later use.

[0087] The data processing within the learning module 311 may proceed in a batch processing fashion in which all of the vectors within the experimental data 315-experimental result 316 data set are processed at a single time. In such a process, the experimental data 315-experimental result 316 data set is received by the input module 312, processed by the training module 313, and the generated coefficients are placed within the database 313 by the storage module 314. Alternatively, the experimental data 315-experimental result 316 data set may be processed as a sequence of smaller data sets in which the experimental data 315-experimental result 316 data set data values are generated at different times. In such a process, the training module 313 uses the previously stored coefficients retrieved by the storage module along with a new small data set provided by the input module 312 to generate an updated set of coefficients. These updated coefficients may be once again stored within the database 313 for use at a later time.

[0088] Once an artificial neural network 301 has been trained, the prediction module 321 may be used to predict, or classify, a particular test data value 325. The prediction module 321 includes a data prediction input module 322, an ANN prediction module 323, and an ANN curve slope module 324. The data prediction input module 322 receives the input test data generated as described above for use in the prediction module. The ANN prediction module 323 receives and utilizes the network coefficient values for the neural network from the ANN coefficient database 313 to predict the possible result for the probability distribution relationship specified within the neural network. This output value is used by the ANN curve slope module 324 to determine all possible values for a given gene, in the manner discussed above, to determine a curve slope value. This slope value is then output for later use in ranking and classifying the individual genes used to determine the presence, or lack there of, for a disease.

[0089] The embodiments described herein are implemented as logical operations performed by a computer. The logical operations of these various embodiments of the present invention are implemented (1) as a sequence of computer implemented steps or program modules running on a computing system and/or (2) as interconnected machine modules or hardware logic within the computing system. The implementation is a matter of choice dependent on the performance requirements of the computing system implementing the invention. Accordingly, the logical operations making up the embodiments of the invention described herein can be variously referred to as operations, steps, or modules.

[0090] While the above embodiments of the invention describe the use of an artificial neural network to identify relevant genes associated with diseases and use the identified genes to classify and identify diseases, one skilled in the are will recognize that the use of the processing system discussed above are merely example embodiments of the invention. As long as experimental data is used to self-train a processing system using competitive learning processing, the present invention to would be useable in other data processing systems. It is to be understood that other embodiments may be utilized and operational changes may be made without departing from the scope of the present invention as recited in the attached claims.

### Devices and Methods for Detecting, Monitoring and Treating SRBCTs

[0091] The genes given in table 2, 2b, or 5 below can be used to make up a selection of genes for detection of any one of the four SRBCT types of cancers: neuroblastoma (NB), rhabdoymosarcoma (RMS), Burkitt's lymphoma (BL), or the Ewing family of Tumors (EWS). The gene selection can be used to distinguish a SRBCT type cancer cell from a non-cancerous cell, from a cell of a different type of SRBCT cancer, or from a cell of any other different type of cancer. The cancer type of a gene indicates which cancer that it is differentially expressed in.

TABLE 2

| Image | Gene | E S | | RMS | | NB | | BL | | Cancer | SEQ. ID. |
|---|---|---|---|---|---|---|---|---|---|---|---|
| Id. | symbol | Rank | Sign | Rank | Sign | Rank | Sign | Rank | Sign | Type | NO. |
| 812105 | AF1Q | 670 | − | 934 | − | 2 | + | 51 | − | NB | SEQ. ID. |
| | | | | | | | | | | | NO. 32 |
| 383188 | RCV1 | 478 | − | 808 | + | 13 | + | 42 | − | NB | SEQ. ID. |
| | | | | | | | | | | | NO. 38 |
| 82225 | SFRP1 | 160 | − | 264 | + | 17 | + | 85 | − | NB | SEQ. ID. |
| | | | | | | | | | | | NO. 42 |
| 878280 | CRMP1 | 602 | − | 1255 | + | 12 | + | 45 | − | NB | SEQ. ID. |
| | | | | | | | | | | | NO. 33 |
| 135688 | CATA2 | 354 | + | 155 | − | 37 | + | 88 | − | NB | SEQ. ID. |
| | | | | | | | | | | | NO. 44 |
| 308231 | EST | 524 | − | 1015 | + | 10 | + | 117 | − | NB | SEQ. ID. |
| | | | | | | | | | | | NO. 39 |
| 486110 | PFN2 | 1554 | + | 1500 | + | 31 | + | 31 | − | NB | SEQ. ID. |
| | | | | | | | | | | | NO. 45 |
| 377048 | EST | 733 | − | 560 | + | 23 | + | 102 | − | NB | SEQ. ID. |
| | | | | | | | | | | | NO. 40 |
| 784257 | KIF3C | 577 | + | 1099 | − | 64 | + | 44 | − | NB | SEQ. ID. |
| | | | | | | | | | | | NO. 34 |
| 395708 | DPYSL4 | 1269 | + | 591 | − | 28 | + | 91 | − | NB | SEQ. ID. |
| | | | | | | | | | | | NO. 30 |
| 292522 | EST | 221 | − | 667 | + | 32 | + | 189 | − | NB | SEQ. ID. |
| | | | | | | | | | | | NO. 36 |
| 813266 | FHL1 | 1045 | + | 1610 | − | 91 | + | 46 | − | NB | SEQ. ID. |
| | | | | | | | | | | | NO. 47 |
| 244618 | EST | 22 | − | 3 | + | 273 | − | 86 | − | RMS | SEQ. ID. |
| | | | | | | | | | | | NO. 77 |
| 298062 | TNNT2 | 43 | − | 4 | + | 95 | − | 475 | − | RMS | SEQ. ID. |
| | | | | | | | | | | | NO. 74 |
| 324494 | HSPB2 | 1605 | − | 13 | + | 7 | − | 420 | − | RMS | SEQ. ID. |
| | | | | | | | | | | | NO. 62 |
| 122159 | COL3A1 | 791 | + | 29 | + | 1062 | − | 16 | − | RMS | SEQ. ID. |
| | | | | | | | | | | | NO. 66 |
| 788107 | AMPHL | 74 | − | 14 | + | 817 | + | 108 | − | RMS | SEQ. ID. |
| | | | | | | | | | | | NO. 52 |
| 377671 | ITGA7 | 1044 | + | 24 | + | 66 | − | 135 | − | RMS | SEQ. ID. |
| | | | | | | | | | | | NO. 68 |
| 784224 | FGFR4 | 36 | − | 5 | + | 431 | − | 604 | + | RMS | SEQ. ID. |
| | | | | | | | | | | | NO. 71 |
| 293500 | EST | 262 | − | 9 | + | 1084 | − | 138 | − | RMS | SEQ. ID. |
| | | | | | | | | | | | NO. 80 |
| 42558 | GATM | 379 | − | 12 | + | 25 | − | 1020 | − | RMS | SEQ. ID. |
| | | | | | | | | | | | NO. 79 |
| 246377 | EST | 719 | − | 36 | + | 641 | + | 75 | − | RMS | SEQ. ID. |
| | | | | | | | | | | | NO. 51 |
| 809901 | COL15A1 | 1516 | − | 23 | + | 35 | − | 385 | − | RMS | SEQ. ID. |
| | | | | | | | | | | | NO. 67 |
| 769959 | COL4A2 | 1575 | + | 66 | + | 1786 | − | 26 | − | RMS | SEQ. ID. |
| | | | | | | | | | | | NO. 69 |
| 755750 | NME2 | 1840 | + | 26 | + | 591 | − | 82 | − | RMS | SEQ. ID. |
| | | | | | | | | | | | NO. 49 |
| 770394 | FCGRT | 3 | + | 186 | − | 79 | − | 18 | − | EWS | SEQ. ID. |
| | | | | | | | | | | | NO. 20 |
| 866702 | PTPN13 | 2 | + | 74 | − | 230 | − | 62 | − | EWS | SEQ. ID. |
| | | | | | | | | | | | NO. 16 |
| 357031 | TNFAIP6 | 5 | + | 119 | − | 103 | − | 60 | − | EWS | SEQ. ID. |
| | | | | | | | | | | | NO. 18 |
| 377461 | CAV1 | 6 | + | 91 | − | 90 | − | 101 | − | EWS | SEQ. ID. |
| | | | | | | | | | | | NO. 19 |
| 52076 | NOE1 | 7 | + | 33 | − | 1673 | + | 37 | − | EWS | SEQ. ID. |
| | | | | | | | | | | | NO. 13 |
| 1473131 | TLE2 | 10 | + | 1884 | − | 16 | − | 217 | − | EWS | SEQ. ID. |
| | | | | | | | | | | | NO. 15 |
| 208718 | ANXA1 | 12 | + | 827 | − | 1202 | − | 33 | − | EWS | SEQ. ID. |
| | | | | | | | | | | | NO. 2 |
| 80338 | SELENBP1 | 20 | + | 1316 | + | 42 | − | 151 | − | EWS | SEQ. ID. |
| | | | | | | | | | | | NO. 14 |
| 377731 | GSTM5 | 13 | + | 310 | − | 34 | − | 381 | − | EWS | SEQ. ID. |
| | | | | | | | | | | | NO. 23 |
| 814260 | FVT1 | 9 | + | 61 | − | 330 | − | 335 | − | EWS | SEQ. ID. |
| | | | | | | | | | | | NO. 17 |
| 364934 | DAPK1 | 42 | + | 1481 | + | 707 | − | 40 | − | EWS | SEQ. ID. |
| | | | | | | | | | | | NO. 12 |
| 755599 | IFI7 | 16 | + | 177 | − | 30 | − | 918 | − | EWS | SEQ. ID. |
| | | | | | | | | | | | NO. 25 |
| 291756 | TUBB5 | 17 | + | 31 | − | 1325 | + | 245 | − | EWS | SEQ. ID. |
| | | | | | | | | | | | NO. 1 |
| 308497 | EST | 27 | + | 1971 | − | 43 | − | 231 | − | EWS | SEQ. ID. |
| | | | | | | | | | | | NO. 24 |
| 609663 | PRKAR2B | 198 | − | 55 | − | 550 | + | 29 | + | BL | SEQ. ID. |
| | | | | | | | | | | | NO. 95 |
| 868304 | ACTA2 | 1286 | − | 151 | − | 122 | − | 71 | + | BL | SEQ. ID. |
| | | | | | | | | | | | NO. 86 |

TABLE 2b

| | | | EWS | | RMS | | NB | | BL | | Cancer | |
|---|---|---|---|---|---|---|---|---|---|---|---|---|
| Rank | Image Id. | Gene | Rank | Sign | Rank | Sign | Rank | Sign | Rank | Sign | Type | SEQ. ID. NO. |
| 1 | 296448 | IGF2 | 8 | − | 1 | + | 918 | − | 19 | − | RMS | SEQ ID NO 72 |
| 2 | 207274 | IGF2 | 19 | − | 2 | + | 1152 | − | 11 | − | RMS | SEQ ID NO 73 |
| 3 | 841641 | CCND1 | 11 | + | 38 | − | 118 | + | 6 | − | EWS/NB | SEQ ID NO 5 |
| 4 | 365826 | GAS1 | 25 | + | 69 | + | 22 | − | 9 | − | EWS/RMS | SEQ ID NO 59 |
| 5 | 486787 | CNN3 | 130 | − | 39 | + | 14 | + | 17 | − | RMS/NB | SEQ ID NO 43 |
| 6 | 770394 | FCGRT | 3 | + | 186 | − | 79 | − | 18 | − | EWS | SEQ ID NO 20 |
| 7 | 244618 | EST | 22 | − | 3 | + | 273 | − | 86 | − | RMS | SEQ ID NO 77 |
| 8 | 233721 | IGFBP2 | 148 | + | 43 | + | 598 | + | 1 | − | Not BL | SEQ ID NO 28 |
| 9 | 43733 | GYG2 | 4 | + | 261 | − | 99 | − | 21 | − | EWS | SEQ ID NO 21 |
| 10 | 295985 | EST | 1 | − | 51 | + | 9 | + | 522 | + | Not EWS | SEQ ID NO 26 |
| 11 | 629896 | MAP1B | 360 | − | 893 | + | 1 | + | 23 | − | NB | SEQ ID NO 37 |
| 12 | 840942 | HLA-DPB1 | 1161 | + | 383 | − | 6 | − | 12 | + | BL | SEQ ID NO 87 |
| 13 | 80109 | HLA-DQA1 | 226 | − | 1589 | − | 20 | − | 3 | + | BL | SEQ ID NO 88 |
| 14 | 41591 | MN1 | 257 | + | 18 | + | 4 | − | 169 | − | EWS/RMS | SEQ ID NO 60 |
| 15 | 866702 | PTPN13 | 2 | + | 74 | − | 230 | − | 62 | − | EWS | SEQ ID NO 16 |
| 16 | 357031 | TNFAIP6 | 5 | + | 119 | − | 103 | − | 60 | − | EWS | SEQ ID NO 18 |
| 17 | 782503 | EST | 26 | + | 219 | − | 104 | + | 14 | − | EWS/NB | SEQ ID NO 7 |
| 18 | 377461 | CAV1 | 6 | + | 91 | − | 90 | − | 101 | − | EWS | SEQ ID NO 19 |
| 19 | 52076 | NOE1 | 7 | + | 33 | − | 1673 | + | 37 | − | EWS | SEQ ID NO 13 |
| 20 | 811000 | LGALS3BP | 24 | + | 246 | − | 257 | + | 13 | − | EWS/NB | SEQ ID NO 6 |
| 21 | 308163 | EST | 49 | + | 88 | + | 191 | − | 22 | − | RMS/EWS | SEQ ID NO 57 |
| 22 | 812105 | AF1Q | 670 | − | 934 | − | 2 | + | 51 | − | NB | SEQ ID NO 32 |
| 23 | 183337 | HLA/DMA | 317 | − | 1574 | − | 24 | − | 8 | + | BL | SEQ ID NO 89 |
| 24 | 714453 | IL4R | 208 | − | 20 | + | 8 | − | 238 | + | RMS/BL | SEQ ID NO 83 |
| 25 | 298062 | TNNT2 | 43 | − | 4 | + | 95 | − | 475 | − | RMS | SEQ ID NO 74 |
| 26 | 39093 | MNPEP | 46 | + | 224 | + | 21 | − | 103 | − | EWS/RMS | SEQ ID NO 63 |
| 27 | 212542 | EST | 62 | + | 993 | + | 1086 | + | 2 | − | Not BL | SEQ ID NO 53 |
| 28 | 204545 | EST | 471 | + | 49 | + | 1455 | + | 5 | − | Not BL | SEQ ID NO 58 |
| 29 | 383188 | RCV1 | 478 | − | 808 | + | 13 | + | 42 | − | NB | SEQ ID NO 38 |
| 30 | 82225 | SFRP1 | 160 | − | 264 | + | 17 | + | 85 | − | NB | SEQ ID NO 42 |
| 31 | 44563 | GAP43 | 693 | − | 191 | − | 3 | + | 166 | − | NB | SEQ ID NO 35 |
| 32 | 289645 | APLP1 | 41 | + | 102 | − | 107 | + | 61 | − | EWS/NB | SEQ ID NO 4 |
| 33 | 324494 | HSPB2 | 1605 | − | 13 | + | 7 | − | 420 | − | RMS | SEQ ID NO 62 |
| 34 | 563673 | ATQ1 | 35 | + | 1527 | − | 523 | + | 7 | − | Not BL | SEQ ID NO 10 |
| 35 | 1473131 | TLE2 | 10 | + | 1884 | − | 16 | − | 217 | − | EWS | SEQ ID NO 15 |
| 36 | 1416782 | CKB | 134 | + | 416 | + | 851 | + | 4 | − | Not BL | SEQ ID NO 3 |
| 37 | 417226 | MYC | 63 | + | 222 | − | 29 | − | 110 | + | EWS/BL | SEQ ID NO 81 |
| 38 | 878280 | CRMP1 | 602 | − | 1522 | + | 12 | + | 45 | − | NB | SEQ ID NO 33 |
| 39 | 812965 | MYC | 23 | + | 296 | − | 11 | − | 308 | + | EWS/BL | SEQ ID NO 82 |
| 40 | 122159 | COL3A1 | 791 | + | 29 | + | 1062 | − | 16 | − | RMS | SEQ ID NO 66 |
| 41 | 609663 | PRKAR2B | 198 | − | 55 | − | 550 | + | 29 | + | BL | SEQ ID NO 95 |
| 42 | 461425 | MYL4 | 98 | − | 7 | + | 80 | − | 419 | − | RMS | SEQ ID NO 75 |
| 43 | 1469292 | PIM2 | 1007 | + | 242 | − | 53 | − | 36 | + | BL | SEQ ID NO 92 |
| 44 | 809910 | 1-8U | 52 | + | 168 | + | 159 | − | 56 | − | RMS/EWS | SEQ ID NO 55 |
| 45 | 824602 | IFI16 | 336 | + | 149 | − | 33 | − | 89 | + | EWS/BL | SEQ ID NO 84 |
| 46 | 245330 | IGF2 | 65 | − | 6 | + | 147 | − | 434 | − | RMS | SEQ ID NO 78 |
| 47 | 135688 | GATA2 | 354 | + | 155 | − | 37 | + | 88 | − | NB | SEQ ID NO 44 |
| 48 | 1409509 | TNNT1 | 141 | − | 8 | + | 153 | − | 313 | − | RMS | SEQ ID NO 70 |
| 49 | 788107 | AMPHL | 74 | − | 14 | + | 817 | + | 108 | − | RMS | SEQ ID NO 52 |
| 50 | 784593 | EST | 224 | − | 299 | + | 39 | + | 68 | − | RMS/NB | SEQ ID NO 41 |
| 51 | 756556 | C1NH | 90 | + | 238 | + | 284 | − | 38 | − | RMS/EWS | SEQ ID NO 65 |
| 52 | 208718 | ANXA1 | 12 | + | 827 | − | 1202 | − | 33 | − | EWS | SEQ ID NO 2 |
| 53 | 308231 | EST | 524 | − | 1015 | + | 10 | + | 117 | − | NB | SEQ ID NO 39 |
| 54 | 486110 | PFN2 | 1554 | + | 1500 | + | 31 | + | 31 | − | NB | SEQ ID NO 45 |
| 55 | 21652 | CTNNA1 | 104 | + | 117 | + | 2245 | − | 15 | − | Not BL | SEQ ID NO 56 |
| 56 | 377671 | ITGA7 | 1044 | + | 24 | + | 66 | − | 135 | − | RMS | SEQ ID NO 68 |
| 57 | 745343 | REG1A | 166 | + | 93 | − | 40 | − | 153 | + | EWS/BL | SEQ ID NO 85 |
| 58 | 241412 | ELF1 | 882 | − | 1473 | − | 60 | − | 27 | + | BL | SEQ ID NO 90 |
| 59 | 504791 | GSTA4 | 276 | + | 2003 | + | 108 | + | 24 | − | Not BL | SEQ ID NO 11 |
| 60 | 841620 | DPYSL2 | 51 | + | 100 | − | 366 | + | 70 | − | EWS/NB | SEQ ID NO 8 |
| 61 | 859359 | PIG3 | 58 | − | 28 | + | 288 | + | 152 | − | RMS/NB | SEQ ID NO 50 |
| 62 | 45542 | IGFBP5 | 991 | + | 89 | + | 1661 | − | 10 | − | RMS | SEQ ID NO 64 |
| 63 | 80338 | SELENBP1 | 20 | + | 1316 | + | 42 | − | 151 | − | EWS | SEQ ID NO 14 |
| 64 | 45291 | DRPLA | 532 | + | 81 | + | 872 | − | 28 | − | Not BL | SEQ ID NO 54 |
| 65 | 323371 | APP | 1689 | − | 90 | + | 594 | + | 65 | − | Not BL | SEQ ID NO 27 |
| 66 | 897788 | PTPRF | 59 | + | 1358 | − | 734 | + | 20 | − | Not BL | SEQ ID NO 9 |
| 67 | 377731 | GSTM5 | 13 | + | 310 | − | 34 | − | 381 | − | EWS | SEQ ID NO 23 |
| 68 | 784224 | FGFR4 | 36 | − | 5 | + | 431 | − | 604 | − | RMS | SEQ ID NO 71 |
| 69 | 293500 | EST | 262 | − | 9 | + | 1084 | − | 138 | − | RMS | SEQ ID NO 80 |
| 70 | 767183 | HCLS1 | 1481 | − | 1424 | − | 50 | − | 32 | + | BL | SEQ ID NO 91 |
| 71 | 297392 | MT1L | 1361 | − | 483 | − | 113 | − | 30 | + | BL | SEQ ID NO 93 |
| 72 | 325182 | CDH2 | 590 | − | 919 | − | 5 | + | 260 | − | NB | SEQ ID NO 31 |
| 73 | 1435862 | MIC2 | 14 | + | 518 | − | 371 | − | 97 | − | EWS | SEQ ID NO 22 |
| 74 | 377048 | EST | 733 | − | 560 | + | 23 | + | 102 | − | NB | SEQ ID NO 40 |
| 75 | 814260 | FVT1 | 9 | + | 61 | − | 330 | − | 335 | − | EWS | SEQ ID NO 17 |
| 76 | 784257 | KIF3C | 577 | + | 1099 | − | 64 | + | 44 | − | NB | SEQ ID NO 34 |
| 77 | 42558 | GATM | 379 | − | 12 | + | 25 | − | 1020 | − | RMS | SEQ ID NO 79 |
| 78 | 814526 | HSRNASEB | 164 | − | 198 | + | 98 | − | 105 | + | RMS/BL | SEQ ID NO 96 |
| 79 | 839736 | CRYAB | 516 | + | 67 | + | 51 | − | 183 | − | EWS/RMS | SEQ ID NO 61 |
| 80 | 395708 | DPYSL4 | 1269 | + | 591 | − | 28 | + | 91 | − | NB | SEQ ID NO 30 |
| 81 | 416959 | NFIB | 1420 | − | 86 | + | 160 | + | 72 | − | RMS/NB | SEQ ID NO 29 |
| 82 | 364934 | DAPK1 | 42 | + | 1481 | + | 707 | − | 40 | − | EWS | SEQ ID NO 12 |
| 83 | 868304 | ACTA2 | 1286 | − | 151 | − | 122 | − | 71 | + | BL | SEQ ID NO 86 |
| 84 | 755599 | IFI17 | 16 | + | 177 | − | 30 | − | 918 | − | EWS | SEQ ID NO 25 |
| 85 | 246377 | EST | 719 | − | 36 | + | 641 | + | 75 | − | RMS | SEQ ID NO 51 |
| 86 | 291756 | TUBB5 | 17 | + | 31 | − | 1325 | + | 245 | − | EWS | SEQ ID NO 1 |
| 87 | 809901 | COL15A1 | 1516 | − | 23 | + | 35 | − | 385 | − | RMS | SEQ ID NO 67 |
| 88 | 769959 | COL4A2 | 1575 | + | 66 | + | 1786 | − | 26 | − | RMS | SEQ ID NO 69 |
| 89 | 796258 | SGCA | 30 | − | 10 | + | 521 | − | 758 | − | RMS | SEQ ID NO 76 |
| 90 | 854899 | DUSP6 | 774 | + | 150 | + | 838 | + | 39 | − | Not BL | SEQ ID NO 48 |
| 91 | 755750 | NME2 | 1840 | + | 26 | + | 591 | − | 82 | − | RMS | SEQ ID NO 49 |
| 92 | 292522 | EST | 221 | − | 667 | + | 32 | + | 189 | − | NB | SEQ ID NO 36 |
| 93 | 308497 | EST | 27 | + | 1971 | − | 43 | − | 231 | − | EWS | SEQ ID NO 24 |
| 94 | 813266 | FHL1 | 1045 | + | 1610 | − | 91 | + | 46 | − | NB | SEQ ID NO 47 |
| 95 | 200814 | MME | 639 | − | 1081 | + | 78 | − | 66 | + | BL | SEQ ID NO 94 |
| 96 | 768370 | TIMP3 | 547 | + | 1132 | + | 606 | + | 25 | − | Not BL | SEQ ID NO 46 |

[0092] One embodiment of the invention offers a selection of genes that are expressed in a cancer cell. Such selections of genes function to characterize the cancer when the gene selection from the cancer cell is compared to the expression of an identical selection of genes from a noncancerous cell, or a different type of cancer cell. As used herein, the phrase “function to characterize” can mean to identify, to be indicative of, to be highly and/or differentially expressed in. The cancer to be identified can be neuroblastoma, rhabdomyosarcoma, Burkitt's, Ewing family of tumors, or combinations thereof. In one embodiment, at least one of the genes is chosen from table 5. In another embodiment, at least one of the genes is chosen from table 2, or 2b. In yet another embodiment, at least one of the genes is chosen from at least one of tables 6, 7, 8, or 9. In a further embodiment, there are at least 9 genes chosen from table 5, preferentially selected from the top ranked genes. In an even further embodiment, there are at least 9 genes chosen from at least one of tables 2, 2b, 6, 7, 8, or 9, preferentially selected from the top ranked genes.

[0093] As used herein, “Image ID” or “Clone ID” refer to particular genes that are given in various tables. In some embodiments of the invention, gene selections include one or more genes with a given Image ID. In one embodiment, the cancer to be identified is neuroblastoma, and the gene selection includes at least one of the genes with the following Image Id: 812105 (SEQ. ID. NO. 32), 383188 (SEQ. ID. NO. 38), 82225 (SEQ. ID. NO. 42), 878280 (SEQ. ID. NO. 33), 135688 (SEQ. ID. NO. 44), 308231 (SEQ. ID. NO. 39), 486110 (SEQ. ID. NO. 45), 377048 (SEQ. ID. NO. 40), 784257 (SEQ. ID. NO. 34), 395708 (SEQ. ID. NO. 30), 292522 (SEQ. ID. NO. 36), or 813266 (SEQ. ID. NO. 47). In another embodiment, the cancer to be identified is rhabdomyosarcoma and the gene selection includes at least one of the genes with the following Image Id: 244618 (SEQ. ID. NO. 77), 298062 (SEQ. ID. NO. 74), 324494 (SEQ. ID. NO. 62), 122159 (SEQ. ID. NO. 66), 788107 (SEQ. ID. NO. 52), 377671 (SEQ. ID. NO. 68), 784224 (SEQ. ID. NO. 71), 293500 (SEQ. ID. NO. 80), 42558 (SEQ. ID. NO. 79), 246377 (SEQ. ID. NO. 51), 809901 (SEQ. ID. NO. 67), 769959 (SEQ. ID. NO. 69), or 755750 (SEQ. ID. NO. 49). In yet another embodiment, the cancer to be identified is Burkitt's, and the gene selection includes at least one of the genes with the following ImageID: 609663 (SEQ. ID. NO. 95), or 868304 (SEQ. ID. NO. 86). In a further embodiment, the cancer to be identified is a Ewing family of tumors cancer, and the gene selection includes at least one of the genes with the following Image Id: 770394 (SEQ. ID. NO. 20), 866702 (SEQ. ID. NO. 16), 357031 (SEQ. ID. NO. 18), 377461 (SEQ. ID. NO. 19), 52076 (SEQ. ID. NO. 13), 1473131 (SEQ. ID. NO. 15), 208718 (SEQ. ID. NO. 2), 80338 (SEQ. ID. NO. 14), 377731 (SEQ. ID. NO. 23), 814260 (SEQ. ID. NO. 17), 364934 (SEQ. ID. NO. 12), 755599 (SEQ. ID. NO. 25), 291756 (SEQ. ID. NO. 1), 308497 (SEQ. ID. NO. 24), or combinations thereof.

[0094] Another embodiment of the invention includes a selection of least one product of a selection of genes. As used herein, the term “product of a gene” or “gene product” can include entities that are naturally produced by the cancer cell. Examples of gene products include, but are not limited to, DNA, mRNA, and proteins. Gene products can be utilized in methods of the invention for diagnosing a cancer or as a target for therapeutic treatment.

[0095] The invention includes gene selections that can include one or more genes chosen from Table 2, 2b or 5. Table 2 lists 41 genes that are specifically expressed in one of the four types of SRBCTs that have not been previously reported to relate to cancer, and which could be used, in any combination, to make up a selection of genes in accordance with the invention. Table 2b shows the 96 top ranked genes, including the 41 genes of Table 2. Alternatively, Table 5 lists the top 200 ranked genes that also include those of Table 2b.

[0096] One embodiment of the invention includes a method of targeting a product of at least one of the genes in table 5 that includes administering a therapeutic agent having a therapeutic effect on said gene product. Another embodiment includes a method of therapeutic treatment of a cancer by using a selection of genes or their products that are expressed in a cancer cell, wherein the genes and/or their products function to characterize the cancer when the gene selection from the cancer cell is compared to the expression of an identical selection of genes from a noncancerous cell, or a different type of cancer cell. Another embodiment includes a method of targeting a product of at least one of the genes in table 2. Yet another embodiment includes a method of targeting a product of at least one of the genes of in table 6, 7, 8 or 9. A therapeutic agent is a biological or chemical entity that are based on some aspect of a gene. Examples of therapeutic agents include, but are not limited to, vaccines, antibodies, oligonucelotide DNA antisense, RNAi, chemical molecules, proteins, inhibitors, antagonists, or combinations thereof Having a therapeutic effect on a gene product can include, but is not limited to, inhibition of some activity or process of a cell, cessation of some activity or process of a cell, an increase in some activity or process of a cell, interference with some process or activity of a cell, modification of the expression of at least one gene, modification of the expression of at least one gene product, modification of the function of at least one gene, and modification of the function of at least one gene product.

[0097] Administration of a therapeutic agent can include delivery of the therapeutic agent to the cell, to the vicinity of the cell, to the vicinity of a tumor, to a patient that has a tumor, or any combination thereof. In one embodiment of the invention, a method of targeting the product of at least one gene is undertaken in order to have an effect on a cancer cell or tumor. To have an effect on a cancer cell means to alter the course of progression, development, or metastasis of a cancer cell. Cancer cells that can be affected by methods of the invention include, but are not limited to, neuroblastoma, rhabdomyosarcoma, Burkitt's, and the Ewing family of tumors. Methods of having an effect on these various types of cancers can be accomplished by having an effect on a product of at least one gene of tables 6, 7, 8, and 9 respectively.

[0098] Another embodiment of the invention includes a method of targeting the product of at least one gene of table 10 that includes administering a therapeutic agent having a therapeutic effect on said gene product. A therapeutic agent is a biological or chemical entity that are based on some aspect of a gene. Examples of therapeutic agents include, but are not limited to, vaccines, antibodies, oligonucelotide DNA antisense, RNAi, chemical molecules, proteins, inhibitors, antagonists, or combinations thereof Having a therapeutic effect on a gene product can include, but is not limited to, inhibition of some activity or process of a cell, cessation of some activity or process of a cell, an increase in some activity or process of a cell, and interference with some process or activity of a cell.

[0099] Administration of a therapeutic agent can include delivery of the therapeutic agent to the cell, to the vicinity of the cell, to the vicinity of a tumor, to a patient that has a tumor, or any combination thereof. In one embodiment of the invention, a method of targeting the product of at least one gene is undertaken in order to have an effect on a cancer cell or tumor. To have an effect on a cancer cell means to alter the course of progression, development, or metastasis of a cancer cell. Cancer cells that can be affected by methods of the invention include, but are not limited to, neuroblastoma, rhabdomyosarcoma, Burkitt's, and the Ewing family of tumors. Methods of having an effect on these various types of cancers can be accomplished by having an effect on a product of at least one gene of tables 6, 7, 8, and 9 respectively.

[0100] Another embodiment of the invention includes methods of using a selection of genes that function to characterize the cancer when the gene selection from a cancer cell is compared to the expression of an identical selection of genes from a noncancerous cell or an identical selection of genes from a different type of cancer cell expressed in a cell for diagnosing a cancer. As used herein, diagnosing can include detection, prognosis and prediction, classification, and or monitoring.

[0101] One embodiment of the invention includes such a method for diagnosis that includes use of a gene selection that includes at least one gene in Table 5. Another embodiment includes such a method for diagnosis that includes use of a gene selection that includes at least one gene from Table 2. The cancer to be diagnosed can include neuroblastoma, rhabdomyosarcoma, Burkitt's, Ewing family of tumors, or combinations thereof.

[0102] As used herein, “Image ID” or “Clone ID” refer to particular genes that are given in the various tables. In some embodiments of the invention, methods for diagnosing include use of a gene selection that includes one or more genes with a given Image ID. In one embodiment, the cancer to be diagnosed is neuroblastoma, and the gene selection includes at least one of the genes with the following Image Id: 812105 (SEQ. ID. NO. 32), 383188 (SEQ. ID. NO. 38), 82225 (SEQ. ID. NO. 42), 878280 (SEQ. ID. NO. 33), 135688 (SEQ. ID. NO. 44), 308231 (SEQ. ID. NO. 39), 486110 (SEQ. ID. NO. 45), 377048 (SEQ. ID. NO. 40), 784257 (SEQ. ID. NO. 34), 395708 (SEQ. ID. NO. 30), 292522 (SEQ. ID. NO. 36), or 813266 (SEQ. ID. NO. 47). In another embodiment, the cancer to be diagnosed is rhabdomyosarcoma and the gene selection includes at least one of the genes with the following Image Id: 244618 (SEQ. ID. NO. 77), 298062 (SEQ. ID. NO. 74), 324494 (SEQ. ID. NO. 62), 122159 (SEQ. ID. NO. 66), 788107 (SEQ. ID. NO. 52), 377671 (SEQ. ID. NO. 68), 784224 (SEQ. ID. NO. 71), 293500 (SEQ. ID. NO. 80), 42558 (SEQ. ID. NO. 79), 246377 (SEQ. ID. NO. 51), 809901 (SEQ. ID. NO. 67), 769959 (SEQ. ID. NO. 69), or 755750 (SEQ. ID. NO. 49). In yet another embodiment, the cancer to be diagnosed is Burkitt's, and the gene selection includes at least one of the genes with the following ImageID: 609663 (SEQ. ID. NO. 95), or 868304 (SEQ. ID. NO. 86). In a further embodiment, the cancer to be diagnosed is a Ewing family of tumors cancer, and the gene selection includes at least one of the genes with the following Image Id: 770394 (SEQ. ID. NO. 20), 866702 (SEQ. ID. NO. 16), 357031 (SEQ. ID. NO. 18), 377461 (SEQ. ID. NO. 19), 52076 (SEQ. ID. NO. 13), 1473131 (SEQ. ID. NO. 15), 208718 (SEQ. ID. NO. 2), 80338 (SEQ. ID. NO. 14), 377731 (SEQ. ID. NO. 23), 814260 (SEQ. ID. NO. 17), 364934 (SEQ. ID. NO. 12), 755599 (SEQ. ID. NO. 25), 291756 (SEQ. ID. NO. 1), 308497 (SEQ. ID. NO. 24), or combinations thereof. Another embodiment of the invention includes use of a product of at least one of those genes for diagnosis of a cancer.

[0103] Another embodiment of the invention includes devices for use in a method of diagnosis. Examples of such devices can include protein arrays, cell arrays, a device to detect single polymorphisms in disease conditions, devices containing metaphase BAC genomes, cDNA arrays, and oligonucleotide arrays.

### WORKING EXAMPLES

[0104] The following examples provide a nonlimiting illustration of various embodiments of the invention.

### Example 1

### Preparation of Microarrays

[0105] Preparation of glass cDNA microarrays, probe labeling, hybridization and image acquisition were performed according to the protocol given below, which is a standard NHGRI protocol (http://www.nhgri.nih.gov/DIR/LCG/15K/HTML/protocol.html).

[0106] Gene-specific DNA was produced by PCR amplification of purified template plasmid DNAs from cloned ESTs. The PCR product was purified by ethanol precipitation, thoroughly resuspended in 3×SSC, and printed onto a poly-L-lysine coated slide.

[0107] The materials, reagents, and solutions used include: 96 well alkaline lysis miniprep kit (Edge BioSystems, Gaithersburg, Md.); LB Broth (Biofluids, Rockville, Md.); Superbroth (Biofluids, Rockville, Md.); dATP, dCTP, dGTP, dTTP, 100 mM each #27-2035-02, store frozen, −20° C. (Pharmacia, Peapack, N.J.); PCR primer AEK M13F (5′-GTTGTAAAACGACGGCCAGTG-3′) (SEQ. ID. NO. 97) and AEK M13R (5′-CACACAGGAAACAGCTATG-3′) (SEQ. ID. NO. 98) at 1 mM concentration, store frozen, −20° C.; 10× PCR Buffer, #N808-0189, and Ampli-Taq DNA polymerase, #N808-4015 store frozen, −20° C. (Perkin Elmer, Norwalk, Conn.); Carbenicillin (Gibco-BRL, Rockville, Md.); Ethanol (200 Proof USP Ethyl Alcohol); 1M Tris-HCl (pH 8); 0.5M NAEDTA (pH 8); T Low E; Buffer; 20×SSC; Glycerol (enzyme grade); Sodium Acetate (tri-hydrate); Boric Acid; Sodium Hydroxide (1M); Glacial Acetic Acid; Succinic anhydride, #23969-0 and 1-methyl-2-pyrrolidinone, #32863-4 (Aldrich Chemical Co., St. Louis, Mo.); Diethyl Pyrocarbonate (DEPC) treated H₂O; Master set of clone-purified, sequence verified human ESTs (e.g. gf211 release, Research Genetics, Huntsville, Ala.); 96 pin inoculating block (#VP 4088, V&P Scientific, Inc, San Diego, Calif.); Airpore Tape Sheets, (#19571, QIAGEN Inc., Valencia, Calif.); Sterile 96-well plate seals, (e.g. # SEAL-THN-STR (Elkay Products, Inc., Shrewsbury, Mass.); 96-well U-Bottom Microtiter Plates, #3799 and 96-well V-Bottom Microtiter Plates, #3894 (Corning Inc., Corning, N.Y.); Thin wall PCR plate and Cylcleseal PCR plate sealer (e.g. #1038-50-0 and #1044-39-4, Robbins Scientific Corp. Sunnyvale, Calif.); household one-gallon sealable storage bags (e.g. Glad Lock); heat sealable storage bags and heat sealer; 0.2 mm Sterile Filtration unit; Diamond scribe for writing on slides; Pyrex baking dish (˜24×34×5 cm); UV transparent plastic wrap (e.g. Glad Cling Wrap); 30 slide rack (stainless steel) #113 and 30 slide glass tank, #122 (Shandon Lipshaw, Pittsburgh, Pa.); 1 L glass tank; 1 L glass beaker; 1 L graduated; cylinder; Stir bar; Slide Box (plastic with no paper or cork liners), (e.g. #60-6306-02, PGC Scientific, Gaithersburg, Md.); PCR heat cycler (e.g. DNA Engine Tetrad, MJ Research, Waltharn, Mass.); Centrifuge with a horizontal (“swinging bucket”) rotor with a depth capacity of 6.2 cm for spinning microtiter plates and filtration plates (e.g. Sorvall Super T 21, Sorvall Inc., Newtown, Conn.); 37° C. Shaker incubator with holders for deep-well plates; 37° C. Waterbath; 65° C. Incubator; Vortex mixer; Immunowash microtiter plate washer, #1575 (BioRad, Hercules, Calif.); pH Meter; Platform Shaker; UV Stratalinker 2400, (Stratagene La Jolla, Calif.); Stirrer/Hotplate; Robotic slide printer; −80° C. Freezer; −20° C. Freezer; 45% (w/v) Sterile Glycerol; 450 grams enzyme grade glycerol per liter 9 Autoclave and store at room temperature); T low E Buffer; 1M Tris-HCl (pH 8.0) 10 mL; 0.5 M EDTA (pH 8.0) 0.2 mL; DEPC treated H₂O 990 mL (Autoclave and store at room temperature); Carbenicillin stock solution (1 gram of carbenicillin in 10 mls of sterile water, Sterile filter with a 0.2 micron filter, Store frozen at −20° C.); LB with 100 μg/ml carbenicillin (Add 1 ml of carbenicillin stock solution to 1 liter of LB, Make fresh); 3M Sodium Acetate pH=6.0 (408.24 grams sodium acetate (tri-hydrate) per liter, 3M acetic acid (172.4 ml per liter), Titrate the pH of the 3M sodium acetate solution to pH 6.0 with the 3M acetic acid solution, Filter sterilize using a 0.2 micron filter, Store at room temperature); Ethanol/acetate mix (Ethanol (100%) 950 ml, Sodium acetate pH=6.0, 50 ml); 1000 ml 3×SSC; DEPC H₂O 42.5 ml; 20×SSC 7.5 ml; 50 ml 70% Ethanol; Ethanol (100%) 350 ml; DEPC H₂O 150 ml; 500 ml.

[0108] The first step was to grow the EST clones. The cDNA clones were obtained from Research Genetics (Huntsville, Ala.) and were their standard microarray set, which consisted of 3789 sequence-verified known genes and 2778 sequence-verified ESTs.

[0109] The sealed master plates were incubated over night at 37° C. Most suppliers provide low density bacterial cultures. Replicating directly from these dilute stocks frequently results in non-growth in the secondary culture. If making the template from a plate that had previously been cultured to high density before freezing, this initial growth step should not be used, as it will reduce the viability of the cultures.

[0110] A set of standard 96 well round (U) bottom plates were then prepared by labeling all plates and placing 100 μl of LB broth containing 100 μg/ml carbenicillin in each well. These plates were used as working copies. To preserve the master set of plates, it was useful to make replicate copies of the master plate to serve as working copies when the master plate was first replicated. The EST clones were then checked to insure that they were in a vector conferring ampicillin resistance, as is common with human IMAGE clones.

[0111] The master plates were spun briefly (about two minutes) at 1000 rpm in a horizontal microtiter plate rotor to remove condensation and droplets from the seals before opening. Bacterial culture fluid on the sealers can easily be transferred from one well to others, cross-contaminating the stocks.

[0112] Then a container was partially filled with 100% alcohol. The 96 pin-replicating tool was dipped in the alcohol, removed and then the pins were flamed.

[0113] The inoculation block was allowed to cool briefly, then the replicating tool was dipped in the master plate and then into the daughter plate. This was repeated as necessary for each plate inoculated. It is useful to color the plate corner near the A-1 well of all master and daughter plates with a marker pen before beginning the replication process in order to reduce mistakes in the relative orientation of the plates. The suggested plates have a notch at this corner as well.

[0114] The inoculated LB plates, with the lids on, were placed into a one gallon sealable bag containing a moistened paper towel and grow overnight at 37° C. Many 37° C. incubators tend to dry out microtiter plate cultures. Placing the plates in a highly humidified bag avoids this problem.

[0115] Next, deep well plates were filled with 1 ml of Superbroth (100 μg/ml carbenicillin) per well. These plates served as the source of culture for template preparation. Using the replicating tool, the deep well plates were then inoculated directly from the freshly grown LB plates. Next, the openings of the deep well plates were covered with Qiagen Airpore Tape Sheets and the plastic lids were placed over the sheet. The plates were then placed in a 37° C. shaker incubator at 200 RPM for twenty-four hours. 50 μl of 45% (w/v) sterile glycerol was added to each well of any working plates that are to be frozen (−80° C.) and subsequently used as culture sources.

[0116] After the EXT clones were grown, the plasmid templates have to be isolated. First, the lysis buffer (Edge Biosystems Kit) was warmed to 37° C. to dissolve the SDS. Then the RNAse solution was added to the resuspension buffer (Edge Biosystems Kit), 1 ml/100 ml, and stored at 4° C. The receiving plates were prepared from the Edge Biosystems Kit by adding 350 μl of ethyl alcohol to each well of the receiving plates. The filter plate was then placed on top and secured with tape. The bacterial cultures in the deep well plates were centrifuged at 1500×g for seven minutes in a centrifuge equipped with a horizontal rotor for 96-well plates. They were then briefly inverted and excess media was tapped out on a clean paper towel. The pellets will loosen and may be lost when pouring off excess media if this step is delayed.

[0117] The pellet was then resuspended in 100 μl of Resuspension Buffer, and Vortexed until the entire pellet was re-suspended. This step is critical. Poor resuspension of the cells results in clumps of cells that do not lyse in subsequent steps. This reduces the yield and decreases the purity of the product. 100 μl of Lysis Buffer was then added and the solution was mixed gently by rocking the plates from side to side, to avoid shearing the bacterial chromosomal DNA. 100 μl of Precipitation buffer was added to each well and briefly mixed. Then, 100 μl of Neutralization buffer was added to each well and Vortexed.

[0118] The contents of the deep wells were then transferred to the waiting filter plates/receiving plate stacks using the wide bore pipette tips provided in the kits. The stacked plates were then centrifuged at 1500×g for twelve minutes in a centrifuge equipped with a horizontal rotor for 96-well plates. The stacked plates were then removed from the centrifuge. The filter plates were removed and discarded. The alcohol and filtrate were decanted from the receiver plate and the excess alcohol was touched off on clean paper towels. 500 μl of 70% ethanol was added to each well and immediately decanted and excess alcohol was touched off with a clean paper towel. Then, the plates were placed in a clean drawer without their lids, covered with a clean paper towel and allowed to dry overnight.

[0119] The next day, the DNA was resuspended in 200 μl of T Low E Buffer. The top was sealed with plate sealer and rehydrated at 4° C. for at least two days before using. They were stored at −20° C. in the interim.

[0120] After the plasmid templates have been isolated, the EST inserts were amplified. For each 96 well plate to be amplified, a PCR reaction mixture was prepared containing the following ingredients: 1000 μl of 10× PCR Buffer, 20 μL of dATP (100 mM), 20 μL of dGTP (100 mM), 20 μL of dCTP (100 mM), 20 μL of dTTP (100 mM), 5 μL of AEK M13F primer (1 mM), 5 μL of AEK M13R primer (1 mM), 100 μL of Ampli-Taq polymerase (5 U/μl), and 8800 mL of H₂O. The 96-well PCR plates were then labeled and 100 μl of the PCR reaction mixture from above was aliquotted to each well. The plates were then gently tapped to insure that no air bubbles were trapped at the bottom of the wells. 1 μl of purified EST plasmid template from above was then added to each well. The donor and recipient plates were then marked at the corner, near the A1 well to facilitate correct orientation during transfer of the template. It was important to make sure that the pipette tips were all submerged in the PCR reaction mix when delivering the template. Missing the liquid was easier when multi-channel pipettes were used.

[0121] The following thermal cycle series was then performed: 1 initial cycle of heating to 96° C. and holding for 30 sec, 25 cycles of denaturing at 94° C. for 30 sec, reannealing at 55° C. for 30 sec, and extending at 72° C. for 150 sec, one final cycle of holding at 72° C. for 5 minutes, then cooling to ambient temperature. After the above cycle, the plates were held at 4° C. while quality controls were performed.

[0122] The quality control was done by agarose gel electrophoresis of the ESTs. If this was the first time the template for these ESTs was being amplified, 2 μl of each PCR product was analyzed on a 2% agarose gel. If amplified products from this template had been previously tested, then one row of wells from each plate amplified was analyzed. Gel imaging allowed a rough quantitation of product while giving an excellent characterization of the product. Band size, as well as the number of bands observed in the PCR products, contributed to an understanding of the final results of the hybridization. The use of gel well formats suitable for loading from 96 well plates and programmable pipetters made this form of analysis feasible on a large scale.

[0123] The materials, reagents and solutions for the quality control check included: Electrophoresis apparatus with capacity for four 50 well combs, (e.g. #D3, Owl Scientific, Woburn, Mass.); 50×Tris-Acetate Electrophoresis BufferM; Agarose; Dye Solution (Xylene Cyanol/Bromophenol Blue) (e.g. #351-081-030, Quality Biological Inc., Gaithersburg Md.); Glycerol (enzyme grade); Ethidium Bromide solution (10 mg/ml); 100 base-pair ladder size standard; Programmable, 12-channel pipetter (e.g. #2019, Matrix Technologies, Lowell, Mass.); Disposable microtiter mixing trays (e.g. Falcon #353911, Becton Dickinson, Franklin Lake, N.J.); Electrophoresis power supply; 1× TAE Buffer; 50× TAE Buffer 40 ml; Ethidium Bromide (10 mg/ml) 0.1 ml and Water 960 ml; 1000 ml; Loading Buffer; Glycerol (enzyme grade) 4.0 ml, DEPC Water 0.9 ml, and Dye Solution* 0.1 ml for a total of 5.0 ml (*This solution is 0.25% (w/v) Xylene Cyanol and 0.25% (w/v) Bromophenol Blue); 100 bp Size Standards; DNA ladder (1 mg/ml) 50 μL, I M Tris-HCl (pH 8.0) 5 μl, 0.5 M EDTA (pH 8.0) 5 μl, and Loading Buffer 440 μl for a total of 500 μl.

[0124] The electrophoresis was carried out with a 2% agarose gel (1× TAE) with four combs (50 tooth) that was submerged in an electrophoresis apparatus with sufficient 1× TAE buffer to just cover the surface of the gel. A reservoir of Loading Buffer was prepared, using 12 wells of a microtiter plate. Then a pipetter was programmed to sequentially carry out the following steps: fill with 2 μl, fill with 1 μL, fill with 2 μl, mix a volume of 5 μl five times, expel 5 μl. Twelve (12) disposable tips were then placed on the pipetter. 2 μl of PCR product from wells A1-A12 of the PCR plate were loaded, followed by 1 μl of air, then 2 μl of Loading Buffer from the reservoir. The tips were then placed in clean wells of a disposable mixing tray and the pipette was allowed to mix the sample and loading dye. The pipette tip was then placed in a 50 well row so that the tip containing the PCR product from well Al is in the second well of the row, and the other tips are in every other succeeding well.

[0125] The process was repeated (changing tips each time), to load PCR plate row B starting in the 3rd well, interleaved with the A row, the C row starting at well 26, and the D row at well 27, interleaved with the C row. Then 5 μl of 100 bp Size Standards were placed in wells 1 and 50. This process was repeated, to load samples from rows E, F, G, and H in the second, 50 well row of gel wells, to load samples from two 96 well PCR plates per gel, or single row samples from 16 PCR plates. To reduce diffusion and mixing, a voltage was applied to the gel for a minute between loading each well strip. This caused the DNA to enter the gel, and reduced band spreading and sample loss.

[0126] A voltage was then applied to the gel and it was run until the bromophenol blue (faster band) had nearly migrated to the next set of wells. For a gel that is 14 cm in the running dimension, and 3 cm between each row of wells, 200 volts were applied for 15 minutes. Digital photos of the gel were taken and the images stored for future reference. The gels should show bands of fairly uniform brightness distributed in size between 600 to 2000 base-pairs. Further computer analysis of such images can be carried out with image analysis packages to provide a list of the number and size of bands. Ideally this information can be made available during analysis of the data from hybridizations involving these PCR products.

[0127] After the quality control checks are run on the plates, the next step involves purifying the PCR products. 96 well V-bottom plates were filled with 200 μl per well of ethanol/acetate mix. The ethanol acetate solution used for precipitation is less acidic (pH 6) than is typically used. In this instance, more acidic solutions produce precipitates which are harder to resuspend without improving yield.

[0128] 100 μl per well of PCR product was transferred into V-bottom plates and mixed by pipetting a volume of 75 μl per well four times. The plates were then placed in a −80° C. freezer for one hour or stored overnight at −20° C. The plates were stored at −20° C. if they were to be left for more than one hour, because aggressive precipitation produces precipitates which are hard to resuspend. The plates were then thawed to reduce brittleness and melt any ice, which may have formed in the wells.

[0129] The plates were loaded into a centrifuge with a horizontal microtiter plate rotor and spun at 2600×g for 40 minutes at 4° C. Next, the supernatant from each well was aspirated using the Immunowash plate washer. Settings for the depth of aspiration by the plate washer needed to be adjusted to suit the microtiter plates used. It is advisable to leave approximately 10-20 ml in the bottom of the well to avoid disturbing the pellet.

[0130] 200 μl of 70% ethanol was delivered to each well in the plate using the Immunowash plate washer, and the plates were centrifuged at 2600×g for 40 minutes. The supernatant was aspirated from each well using the Immunowash plate washer, and the plates were dried overnight in a closed drawer. They should not be dried in a speed-vac because desiccated PCR products are hard to resuspend.

[0131] After the PCR products were purified, they were then resuspended by adding 40 μl of 3×SSC per well. The plates were then sealed with a foil sealer, taking care to achieve a tight seal over each well. The plates were then placed in heat sealable bags with paper towels moistened with 3×SSC and the bag was sealed with a heat sealer. The high external humidity within the sealed bag helped to keep the volumes in the individual wells from varying. The bags were then placed in a 65° C. incubator for 2 hours. The heat in the incubator was then turned off, and the plates were allowed to cool gradually in the incubator to avoid condensation on the sealers. The plates were stored at −20° C.

[0132] The yield of the PCR suspension was then checked by fluorometric determination of DNA concentration. 1 μl of resuspended PCR product from one row of wells from each plate on a 2% agarose gel was analyzed as previously described. Adequate precipitation and resuspension produced very intense bands, with no material failing to leave the loading well, and no smear of material from the band towards the loading well.

[0133] While it would be ideal to be able to exactingly quantify each EST PCR product and spot each DNA species at equivalent concentrations, it is impractical for most labs to do so when thousands of ESTs must be prepared. Fortunately, it is possible to use a strategy where excess DNA is spotted, so that the exact quantities used do not produce much variation in the observed results. When using this strategy, it is necessary to track the average productivity of the PCR reactions. Fluorometry provides a simple way to obtain an approximate concentration of the double-stranded PCR product in the PCR reaction mix.

[0134] Next, the double stranded DNA was quantified. The materials, reagents, and solutions necessary include: reference double-stranded DNA (0.5 mg/ml) (e.g. #15612-013 Gibco/BRL, Bethesda, Md.), 96 well plates for fluorescent detection (e.g. #7105, Dynex, Chantilly, Va.), Fluorometer (e.g. #LS50B, Perkin Elmer, Norwalk, Conn.), FluoReporter Blue dsDNA Quantitation Kit (#F-2962, Molecular Probes, Eugene, Oreg.), TE, 12 channel multi-pipetters, Computer equipped with Microsoft Excel software, Ds-DNA Standards: 50 μg/ml, 100 μg/ml, 250 μg/ml, 500 μg/ml, μl TE 90, 80, 50, 0 μl ds-DNA (0.5 mg/ml) 10, 20, 50, 100, (It is good practice to check both the integrity (agarose gel) and the concentration (absorbance) of the standard before use); Fluor Buffer (Hoechst 33258 solution (contains the dye at an unspecified concentration in a 1:4 mixture of DMSO:H₂O) (from kit) 25 μl, TNE Buffer (TNE Buffer is 10 mM Tris-HCl (pH 7.4), 2 M NaCl, 1 mM EDTA) (from kit) 10 ml.

[0135] The double stranded DNA was quantified as follows. 96 well plates were labeled for fluorescence assay. 200 μl of Fluor Buffer was added to each well. 1 μl of PCR product from each well in a row of a PCR plate was added to a row of the fluorometry plate. Samples were added to rows A through G of the fluorometry plate. In the final row of the fluorometry plate 1 μl of each of the series of ds-DNA standards 0 μg/ml (TE only), 50, 100, 250 and 500 μg/ml ds-DNA were added. This series was repeated twice in the final row.

[0136] The fluorometer was set for excitation at 346 nm and emission at 460 nm, and adjusted as necessary to read the plate. If the fluorometer used did not support automated analysis, the data table was exported to Excel. The response for the standards was tested to see that it was linear and reproducible from the range of 0 to 500 μg/ml of ds-DNA.

[0137] Next, the concentration of ds-DNA in the PCR reactions was calculated using the following equation, after subtracting the average 0 μg/ml value from all other sample and control values:

[ds-DNA(μg/ml)]=((PCR sample value)/(average 100 μg/ml value))*100

Constantly tracking the yields of the PCRs makes it possible to rapidly detect many ways in which PCR can fail or perform poorly. This assay can also be applied after precipitation and resuspension of the PCR products to monitor overall recovery of product. 1 μl of amplified products from one row of wells from each amplified plate by fluorometry was analyzed.

[0138] Slides were then coated with poly-L-lysine to have a surface that is both hydrophobic and positively charged. The hydrophobic character of the surface minimizes spreading of the printed spots, and the charge appears to help position the DNA on the surface in a way that makes cross-linking more efficient.

[0139] Materials, reagents, and solutions for coating the slides includes: Gold Seal Microscope Slides (#3011, Becton Dickinson, Franklin Lake, N.J.), Ethanol (100%), Poly-L-lysine (#P8920, Sigma, St. Louis, Mo.), 50 Slide Stainless Steel Rack, #900401, and 50 Slide Glass Tank, #900401, (Wheaton Science Products, Millville, N.J.), Sodium Hydroxide, Stir Plate, Stir Bar, Platform Shaker, 30 Slide Rack, #196, plastic, and 30 slide Box, #195, plastic, (Shandon Lipshaw, Pittsburgh, Pa.), Sodium Chloride, Potassium Chloride, Sodium Phosphate Dibasic Heptahydrate, Potassium Phosphate Monobasic, Autoclave, 0.2 mm Filter: Nalgene, Centrifuge: Sorvall Super 20, Slide Box (plastic with no paper or cork liners), (e.g. #60-6306-02, PGC Scientific, Gaithersburg, Md.), 1 L Glass Beaker; 1 L Graduated Cylinder, 1M Sodium Borate (pH 8.0) (Dissolve 61.83 g of Boric acid in 900 ml of DEPC H₂O. Adjust the pH to 8.0 with 1N NaOH. Bring volume up to one liter. Sterilize with a 0.2 micron filter and store at room temperature), Cleaning Solution (H₂O 400 ml, Ethanol 600 ml, NaOH 100 g—Dissolve NaOH in H₂O. Add ethanol and stir until the solution clears. If the solution does not clear, add H₂O until it does), and Poly-L-lysine Solution (poly-L-lysine (0.1% w/v) 35 ml PBS 35 ml H₂O 280 ml 350 ml).

[0140] First, the slides are placed into 50 slide racks and the racks are placed in glass tanks with 500 ml of cleaning solution. Gold Seal Slides are highly recommended, as they have been found to have consistently low levels of autofluorescence. It was important to wear powder free gloves when handling the slides to avoid contamination.

[0141] The tanks are placed on platform shakers for two hours at 60 rpm. After being shook, the cleaning solution was poured out, and the slides were then washed in H₂O for three minutes. This wash was repeated four times. The slides were then transferred to 30 slide plastic racks and placed into small plastic boxes for coating. The slides were then submerged in 200 ml poly-L-lysine solution per box. The slide boxes were then placed on platform shaker for one hour at 60 rpm. The slides were rinsed three times with H₂O, and submerged in H₂O for one minute, and then centrifuged for two minutes at 400×g and the slide boxes used for coating were dried.

[0142] The slides were then placed back into the slide box used for coating and allowed to stand overnight before transferring to a new slide box for storage. This allowed the coating to dry before it was handled. The slides were allowed to age for two weeks on the bench, in a new slide box, before they were printing on. The coating dried slowly, becoming more hydrophobic with time.

[0143] Slide boxes used for long term storage should be plastic and free of cork lining. The glue used to affix the cork will leach out over time and give slides stored in these types of boxes a greasy film that has a high degree of autofluorescence. All glassware and racks used for slide cleaning and coating should be cleaned with highly purified H₂O only, and detergent should not be used.

[0144] Once the slides were coated, they were printed. The variety of printers and pens for transferring PCR products from titer plates to slides precludes highly detailed descriptions of the process. The following steps provide a general description of the processing.

[0145] The print pens were pre-cleaned according to the manufacturer's specification. The printer slide deck was then loaded with poly-L-lysine coated slides from above. The plates containing the purified EST PCR products were thawed and centrifuged briefly, (about two minutes) at 1000 rpm in a horizontal microtiter plate rotor to remove condensation and droplets from the seals before being opening. 5 to 10 μl of the purified EST PCR products were transferred to a plate that served as the source of solution for the printer. Printing with quill-type pens usually requires that the volume of fluid in the print source was sufficiently low, so that when the pen was lowered to the bottom of the well, it was submerged in the solution to a depth of less than a millimeter. This keeps the pen from carrying a large amount of fluid on the outside of the pen shaft and producing variable, large spots on the first few slides printed.

[0146] A repetitive test print was run on the first slide. In this operation, the pens were loaded with the DNA solution, and then the pens serially deposited this solution on the first slide in the spotting pattern specified for the print. This test was run to check the size and shape of the specified spotting pattern, as well as its placement on the slide. It also served to verify that the pens were loading and spotting, and that a single loading produced as many spots as were required to deliver material to every slide in the printer. If one or more of the pens was not performing at the desired level, it was re-cleaned or substituted with another pen and tested again. If all pens were performing, the full print was carried out.

[0147] At the end of the print, the slides were removed from the printer, labeled with the print identifier and the slide number by writing on the edge of the slide with a diamond scribe and placed in a dust free slide box to age for one week. It was useful to etch a line, which outlined the printed area of the slide, onto the first slide. This served as a guide to locate the area after the slides have been processed, and the salt spots were then washed off.

[0148] The slides were placed, printed side face up, in a casserole dish and covered with cling wrap. The slides were then exposed to a 450 mJ dose of ultraviolet irradiation in the Stratalinker. Slides should have been and were aged at ambient temperature in a closed slide box for one week prior to blocking. The slides were then transferred to a 30 slide stainless steel rack and the rack was placed into a small glass tank. 6.0 g succinic anhydride was dissolved in 325 ml 1-methyl-2-pyrrolidinone in a glass beaker by stirring with a stir bar. Nitrile gloves were worn and the work was carried out in a chemical fume hood while handling 1-methyl-2-pyrrolidinone (a teratogen).

[0149] 25 ml 1M sodium borate buffer (pH 8.0) was added to the beaker. The solution was allowed to mix for a few seconds, then rapidly poured into a glass tank with slides. Succinic anhydride hydrolyzed quite rapidly once the aqueous buffer solution was added. To obtain quantitative passivation of the poly-L-lysine coating, it was critical that the reactive solution be brought in contact with the slides as quickly as possible. The glass tank was placed on a platform shaker in a fume hood for 20 minutes. Small particulates resulting from precipitation of reaction products may be visible in the fluid.

[0150] While the slides were incubating on the shaker a boiling H₂O bath was prepared to denature the DNA on the slides. After the slides were incubated for 20 minutes, they were transferred into the boiling H₂O bath. The heating element was immediately turned off after the slides were submerged in the bath. The slides were allowed to stand in the H₂O bath for 2 minutes. The slides were then transferred into a glass tank filled with 100% ethanol and incubated for 4 minutes. The slides were removed and centrifuged at 400 rpm for 3 minutes in a horizontal microtiter plate rotor to dry the slides. The slides were then transferred to a clean, dust free slide box and allowed to stand overnight before being used for collection of gene expression data.

### Example 2

### Cell Culture and Tumor Samples

[0151] The source and other information for the cell lines and tumor samples used herein are described in Table 3 below for both the training set and the test samples.

TABLE 3
Supplement Table: Known Molecular Characteristics of Samples.

| | Histological | Molecular | Source | |
|---|---|---|---|---|
| Sample Label | Diagnosis | Markers | Label | Source |
| EWS-C1 | EWS-C | EWS-FLI1, 10-6 | A4573 | NCI |
| EWS-C2 | EWS-C | EWS-FLI1, type I | TC71 | NCI |
| EWS-C3 | EWS-C | EWS-FLI1, type I | TC108 | NCI |
| EWS-C4 | EWS-C | EWS-FLI1, type I | 5838 | NCI |
| EWS-C6 | EWS-C | EWS-FLI1, type I | A673 | NCI |
| EWS-C7 | EWS-C | EWS-FLI1, type I | ES-CL1 | MSKCC |
| EWS-C8 | EWS-C | EWS-FLI1, type I | TC32 | NCI |
| EWS-C9 | EWS-C | EWS-FLI1, type II | SK-ES-1 | ATCC |
| EWS-C10 | EWS-C | EWS-FLI1, type II | SK-N-MC | ATCC |
| EWS-C11 | EWS-C | EWS-FLI1, type II | RDES | ATCC |
| EWS-T1 | EWS-T | EWS-FLI1, type I | ES20 | MSKCC |
| EWS-T2 | EWS-T | EWS-FLI1, type II | ES13 | MSKCC |
| EWS-T3 | EWS-T | EWS-FLI1, type I | ES16 | MSKCC |
| EWS-T4 | EWS-T | EWS-FLI1, type I | ES17 | MSKCC |
| EWS-T6 | EWS-T | EWS-FLI1, 7-8 | ES22 | MSKCC |
| EWS-T7 | EWS-T | EWS-ERG, 7-9 | ES25 | MSKCC |
| EWS-T9 | EWS-T | EWS-FLI1, type I | 9602P006 | CHTN |
| EWS-T11 | EWS-T | EWS-FLI1, type I | 9703P152 | CHTN |
| EWS-T12 | EWS-T | EWS-FLI1, type I | 9704P218 | CHTN |
| EWS-T13 | EWS-T | EWS-FLI1, type I | ES23 | MSKCC |
| EWS-T14 | EWS-T | EWS-FLI1, type I | 9605P074 | CHTN |
| EWS-T15 | EWS-T | EWS-FLI1, type I | 9609P027 | CHTN |
| EWS-T19 | EWS-T | EWS-FLI1, type I | SARC75 | CHTN |
| RMS-C2 | ERMS-C | — | RD | ATCC |
| RMS-C3 | ARMS-C | ND | RH4 | NCI |
| RMS-C4 | ARMS-C | PAX3-FKHR | RH3 | NCI |
| RMS-C5 | ARMS-C | PAX3-FKHR | RH5 | NCI |
| RMS-C6 | ARMS-C | PAX3-FKHR | RH28 | NCI |
| RMS-C7 | ARMS-C | ND | RH30 | NCI |
| RMS-C8 | ERMS-C | — | CTR | ATCC |
| RMS-C9 | ARMS-C | PAX3-FKHR | RH4 | NCI |
| RMS-C10 | ARMS-C | PAX3-FKHR | RMS13 | NCI |
| RMS-C11 | ERMS-C | — | TE671 | ATCC |
| RMS.T1 | ARMS-T | PAX3-FKHR | RMS3 | MSKCC |
| RMS.T2 | ARMS-T | PAX3-FKHR | RMS6 | MSKCC |
| RMS.T3 | ERMS-T | — | RMS2 | MSKCC |
| RMS.T4 | ERMS-T | no PAX-FKHR | RMS5 | MSKCC |
| RMS.T5 | ARMS-T | PAX3-FKHR | RMS10 | MSKCC |
| RMS.T6 | RMS-T | ND | RT1 | CHTN |
| RMS.T7 | ERMS-T | — | RT4 | CHTN |
| RMS.T8 | RMS-T | ND | RT5 | CHTN |
| RMS.T10 | RMS-T | ND | RT2 | CHTN |
| RMS.T11 | ERMS-T | — | RHAB2 | CHTN |
| NB-C1 | NB-C | MYCN amp | KCNR | NCI |
| NB-C2 | NB-C | — | GICAN | NCI |
| NB-C3 | NB-C | — | SK-N-AS | ATCC |
| NB-C4 | NB-C | MYCN amp | LAN5 | NCI |
| NB-C5 | NB-C | MYCN amp | SK-N-BE2 | ATCC |
| NB-C6 | NB-C | MYCN amp | SK-N-DZ | ATCC |
| NB-C7 | NB-C | — | GICAN | NCI |
| NB-C8 | NB-C | — | NGP | NCI |
| NB-C9 | NB-C | — | SH-SY5Y | ATCC |
| NB-C10 | NB-C | MYCN amp | SK-N-FI | ATCC |
| NB-C11 | NB-C | Single copy MYCN | SK-N-SH | ATCC |
| NB-C12 | NB-C, | MYCN amp | CHP-134B | NCI |
| BL-C1 | BL-C | — | RAMOS (RAI) | ATCC |
| BL-C2 | BL-C | — | ST488 | ATCC |
| BL-C3 | BL-C | — | CA46 | ATCC |
| BL-C4 | BL-C | — | ST486 | ATCC |
| BL-C5 | BL-C | — | RAJI | ATCC |
| BL-C6 | BL-C | — | MC116 | ATCC |
| BL-C7 | BL-C | — | DAUDI | ATCC |
| BL-C8 | BL-C | — | SULTAN | ATCC |
| Test1 | NB-C | MYCN amp | IMR32 | ATCC |
| Test2 | EWS-C | ND | CHOP1 | NCI |
| Test3 | Osteosarcoma-C | — | OsA-CI | ATCC |
| Test4 | ARMS-T | — | ARMD1 | CHTN |
| Test5 | Sarcoma | — | A204 | ATCC |
| Test 6 | EWS-T | EWS-FLI1, type I | 9608P053 | CHTN |
| Test7 | BL-C | — | EB1 | ATCC |
| Test8 | NB-C | — | SMSSAN | NCI |
| Test9 | Sk. Muscle | — | SkM1 | CHTN |
| Test10 | ERMS-T | — | ERDM1 | CHTN |
| Test11 | Prostate Ca.-C | — | PC3 | ATCC |
| Test12 | EWS-T | — | SARC67 | CHTN |
| Test13 | Sk. Muscle | — | SkM2 | CHTN |
| Test 14 | NB-T | Single copy MYCN | NB3 | DZNSG |
| Test 15 | BL-C | — | EB2 | ATCC |
| Test 16 | NB-T | Single copy MYCN | NB1 | DZNSG |
| Test 17 | ARMS-T | — | ARMD2 | CHTN |
| Test 18 | BL-C | — | GA10 | ATCC |
| Test 19 | EWS-T | ND | ET3 | CHTN |
| Test 20 | EWS-T | EWS-FLI1, type I | 9903P1339 | CHTN |
| Test 21 | EWS-T | EWS-FLI1, type II | ES23 | MSKCC |
| Test 22 | ERMS-T | — | ERMD2 | CHTN |
| Test 23 | NB-T | Single copy MYCN | NB2 | DZNSG |
| Test 24 | ERMS-T | no PAX-FKHR | RMS4 | MSKCC |
| Test 25 | NB-T | Single copy MYCN | NB4 | DZNSG |

Supplement Table: Known molecular characteristics of samples. Table labels and abbreviations are described in Table 1 in the manuscript. EWS and ARMS samples with noted translocations were verified by RT-PCR.
ND: not determined.
Amp.: amplification.

[0152] All the original histological diagnoses were made at tertiary hospitals, which have reference diagnostic laboratories with extensive experience in the diagnosis of pediatric cancers. Approximately 20% of all samples in each category were randomly selected, blinded and set aside for testing. To augment this test set, we added 4 neuroblastoma tumors and 5 non-SRBCT samples (also blinded to the authors performing the analysis). The EWSs had a spectrum of the expected translocations, and the RMSs were a mixture of both ARMS containing the PAX3-FKHR translocation and embryonal rhabdomyosarcoma (ERMS). The NBs contained both MYCN amplified and single copy samples. The BLs were cell lines derived from BL. Table 3 gives details of these samples as well.

[0153] This protocol details the methods used to extract RNA from cells, purify the RNA by a combination of phase extraction and chromatography, and prepare a labeled cDNA copy of the message fraction of the purified RNA. The protocol also describes the process of making fluorescent cDNA representations of the message pools within the isolated total RNA pools. This is accomplished by using the pure total RNA as a substrate for reverse transcription in the presence of nucleotides derivatized with either a Cy3 or a Cy5 fluorescent tag.

[0154] The materials, reagents, and solutions needed include: Trizol Reagent (#15596-018, Life Technologies, Rockville, Md.); RNeasy Maxi Kit (#75162, Qiagen, Valencia, Calif.); Chloroform; Ethanol (200 Proof USP Ethyl Alcohol); DPBS (Dulbecco's phosphate buffered saline); 3M sodium acetate (pH 5.2); DATP, dCTP, dGTP, dTTP, 100 mM each, store frozen, −20° C. (#27-2035-02, Pharmacia, Peapack, N.J.); pd(T)12-18 resuspend at 1 mg/ml, and store frozen −20° C. (#27-7858, Amersham Pharmacia Biotech); Anchored oligo primer (anchored;5′-TTT TTT TTT TTT TTT TTT TTV N-3′) (SEQ. ID. NO. 99); resuspend at 2 mg/ml, store frozen −20° C. (e.g. #3597-006, Genosys); CyTM3-dUTP, 1 mM, and CyTM5-dUTP, 1 mM, store −20° C., light sensitive; RNasina Rnase inhibitor, store −20° C. (#N211A, Promega); SUPERSCRIPTTM II Rnase H′ Reverse Transcriptase Kit, store −20° C., (#18064-014, Life Technologies, Rockville, Md.); C0t-1 DNA, 1 mg/ml, store frozen −20° C. (#15279-011, Life Technologies, Rockville, Md.); 0.5M EDTA( pH 8.0); 1 N NaOH; 1M TRIS-HCL; (pH7.5); TE pH 7.4; DEPC water 50×Tris Acetate Buffer; 15 ml round bottom; polypropylene centrifuge tubes; 50 ml conical polypropylene centrifuge tubes; 1.5 ml; Eppendorf tubes; 0.2 ml thin wall PCR tube; MicroCon 100 (Amicon Cat No. 42412); High speed centrifuge for 15 ml tubes; Clinical centrifuge with horizontal rotor for 50 ml conical tubes; Tissue homogenizer (e.g. Polytron PT1200 with Polytron-Aggregate-Dispergier-und-Mischtechnik 147a Ch6014 #027-30-520-0, Brinkmann Instruments Inc., Westbury, N.Y.); RPE Buffer (Add 4 volumes of ethanol per volume of RPE concentrate supplied in Quiagen Kit0; RW1 Buffer (Supplied in Qiagen Kit) 75% EtOH(Ethanol (100%) 375 ml, and DEPC H2O 125 ml for a total of 500 ml); 10× low T dNTP Mix (25 μL dGTP (100 mM), 25 μL dATP (100 mM), 25 μL dCTP (100 mM), 10 μL dTTP (100 mM), and 415 μL DEPC H₂O for a total of 500 μL); 5× First Strand Buffer (Provided with Superscript II); TAE Buffer (50× Tris Acetate Electrophoresis Buffer 20 ml, and DEPC H2O 980 mL for a total of 1000 ml).

[0155] If the cells that were used were harvested from tissue culture, the cell pellet was washed twice in DPBS. If the cells that were used were from tissue culture, 1 ml of Trizol was added per 2×10⁷ cells and mixed by shaking. If tissue was being used, 100 mg of frozen tissue was added directly to 4 ml of Trizol, and dissociate by homogenization with a rotating blade tissue homogenizer.

[0156] Whatever the source, 2/10 volume of chloroform was added to the cells and shook for 15 seconds, and then allowed to stand for 3 minutes, followed by centrifugation at 12,000×g for 15 minutes at 4° C. The supernatant was taken off and added to a polypropylene tube, while recording the volume of the supernatant.

[0157] Then 0.53 volumes of ethanol were slowly added to the supernatant while vortexing, this produced a final ethanol concentration of 35%. The ethanol was added drop by drop and allowed to mix completely with the supernatant before more ethanol is added. If a high local concentration of ethanol is produced, the RNA in that vicinity will precipitate.

[0158] The supernatant from an extraction of 2×10⁷ to 1×10⁸ cells was added to an RNeasy maxi column, which is seated in a 50 ml centrifuge tube. The tube was then centrifuged at 2880×g in a clinical centrifuge with a horizontal rotor at room temperature for 5 minutes. The flow-through was then poured back onto the top of the column and centrifuged again. This step is necessary because a significant amount of RNA is not captured by the column matrix in the first pass of the RNA containing solution through the column.

[0159] The flow-through was discarded and 15 ml of RW1 buffer was added to the column, followed by centrifugation at 2880×g for 5 minutes. The flow-through was discarded again and then 10 ml of RPE buffer was added, followed again by centrifugation at 2880×g for 5 minutes. Once again, the flow through was discarded and another 10 ml of RPE buffer was added, and the column was centrifuged at 2880×g for 10 minutes.

[0160] Next, the column was placed in a fresh 50 ml tube and add 1 ml of DEPC treated water from the kit was added to the column, and the column was allowed to stand for 1 minute. The column was then centrifuged at 2880×g for 5 minutes, and another 1 ml of water was added to the column. The column was allowed to stand for 1 minute, followed by centrifugation at 2880×g for 10 minutes.

[0161] Then, 400 μl portions of the column eluate was aliquotted to 1.5 ml Eppendorf tubes, to which 1/10 volume of 3M sodium acetate (pH 5.2) was added, along with 1 ml of ethanol. The tubes were then allowed to stand for 15 minutes, after which they were centrifuged at 12000×g at 4C for 15 minutes. The pellet was then washed two times in 75% EtOH and stored at −80° C.

[0162] The RNA was resuspended at approximately 1 mg/ml in DEPC H₂O. It was then concentrated to greater than 7 mg/ml by centrifugation on a MicroCon 100 filter unit, centrifuged at 500×g, checking as necessary to determine the rate of concentration. This step removes many residual, small to medium sized, molecules that inhibit the reverse transcription reaction in the presence of fluorescently derivatized nucleotides. The concentration of RNA in the concentrated sample was then determined by spectrophotometry, and the sample was stored at −80° C.

[0163] If an anchored oligo dT primer was used, the primer was annealed to the RNA in the following 17 μl reaction (a 0.2 ml thin wall PCR tube was used so that incubations could be carried out in a PCR cycler):

| | addition for | | addition for | |
|---|---|---|---|---|
| Component | Cy5 labeling | | Cy3 labeling | |
| Total RNA (>7 mg/ml) | 150-200 | μg | 50-80 | μg |
| Anchored primer (2 μg/μl) | 1 | μl | 1 | μl |
| DEPC H2O | to 17 | μl | to 17 | μl |

[0164] If an oligo dT(12-18) primer was used, the primer was annealed to the RNA in the following 17 μl reaction:

| | addition for | | addition for | |
|---|---|---|---|---|
| Component | Cy5 labeling | | Cy3 labeling | |
| Total RNA (>7 mg/ml) | 150-200 | μg | 50-80 | μg |
| dT(12-18) primer (1 μg/μl) | 1 | μl | 1 | μl |
| DEPC H2O | to 17 | μl | to 17 | μl |

[0165] The incorporation rate for Cy5-dUTP is less than that of Cy3-dUTP, so more RNA is labeled to achieve more equivalent signal from each species.

[0166] It was then heated to 65° C. for 10 minutes and cooled on ice for 2 minutes. Then, 23 μl (8 μl of 5× first strand buffer, 4 μl of 10× low T dNTPs mix, 4 μl of Cy5 or Cy3 dUTP (1 mM), 4 μl of 0.1 M DTT, 1 μl of Rnasin (30 u/μl), and 2 μl of Superscript II (200 u/μl)) of reaction mixture containing either Cy5-dUTP or Cy3-dUTP nucleotides was added, mixed well by pipetting and a brief centrifuge spin was used to concentrate it in the bottom of the tube. Superscript polymerase is very sensitive to denaturation at air/liquid interfaces, so we were careful to suppress foaming in all handling of this reaction.

[0167] It was then incubated at 42° C. for 30 min., after which 2 μl Superscript II was added, making sure the enzyme was well mixed in the reaction volume and incubated at 42° C. for 30-60 min. Then, 5 μl of 0.5M EDTA was added, making sure the reaction was stopped with EDTA before adding NaOH (the next step), since nucleic acids precipitate in alkaline magnesium solutions.

[0168] Then, 10 μl 1N NaOH was added and it was incubated at 65° C for 60 minutes to hydrolyze residual RNA, after which it was cooled to room temperature. The purity of the sodium hydroxide solution used in this step is crucial. Slight contamination or long storage in a glass vessel can produce a solution that will degrade the Cy5 dye molecule, turning the solution yellow. Some researchers achieve better results by reducing the time of hydrolysis to 30 minutes.

[0169] It was then neutralized by adding 25 μl of 1M Tris-HCl (pH 7.5). Then, the labeled cDNA was desalted by adding the neutralized reaction, 400 μl of TE pH 7.5 and 20 μg of human C0t-1 DNA to a MicroCon 100 cartridge. It was then pipetted to mix, and spun for 10 minutes at 500×g. 200 μl TE pH 7.5 was added, and the solution was then concentrated to about 20-30 μl (approximately 8-10 min at 500×g). Alternatively, a smaller pore MicroCon 30 was used to speed the concentration step. In this case, the first wash was centrifuged for approximately 4.5 minutes at 16,000×g and the second (200 μl wash) for about 2.5 minutes at 16,000×g.

[0170] It was then recovered by inverting the concentrator over a clean collection tube and spinning for 3 min at 500×g. In some cases, the cy5 labeled cDNA formed a gelatinous blue precipitate that was recovered in the concentrated volume. The presence of this material signaled the presence of contaminants. The more extreme the contamination, the greater the fraction of cDNA which will be captured in this gel. Even if heat solubilized, this material tends to produce uniform, non-specific binding to the DNA targets. When concentrating by centrifugal filtration, the times required to achieve the desired final volume were variable. Overly long spins can remove nearly all the water from the solution being filtered. When fluor-tagged nucleic acids are concentrated onto the filter in this fashion, they are very hard to remove, so it is necessary to approach the desired volume by conservative approximations of the required spin times. If control of volumes proves difficult, the final concentration can be achieved by evaporating liquid in the speed-vac. Vacuum evaporation, if not to dryness, does not degrade the performance of the labeled cDNA.

[0171] Next, a 2-3 μl aliquot of the Cy5 labeled cDNA was taken for analysis, leaving 18-28 μl for hybridization. This probe was run on a 2% agarose gel (6 cm wide×8.5 cm long, 2 mm wide teeth) in Tris Acetate Electrophoresis Buffer (TAE). For maximal sensitivity when running samples on a gel for fluor analysis, a loading buffer with minimal dye was used and no ethidium bromide was added to the gel or running buffer.

[0172] The gel was then scanned on a Molecular Dynamics Storm fluorescence scanner (setting: red fluorescence, 200 micron resolution, 1000 volts on PMT). Successful labeling produces a dense smear of probe from 400 bp to >1000 bp, with little pile-up of low molecular weight transcripts. Weak labeling and significant levels of low molecular weight material indicates a poor labeling. A fraction of the observed low molecular weight material is unincorporated fluor nucleotide.

[0173] Next, the fluorescent cDNA had to be hybridized to the microarray. The volume of hybridization solution required was first determined. The rule of thumb is to use 0.033 μl for each mm 2 of slide surface area covered by the cover slip used to cover the array. An array covered by a 24 mm by 50 mm cover slip required 40 μl of hybridization solution. The volume of the hybridization solution is critical. When too little solution is used, it is difficult to seat the cover slip without introducing air bubbles over some portion of the arrayed ESTs, and the cover slip will not sit at a uniform distance from the slide. If the cover slip is bowed toward the slide in the center, there will be less labeled cDNA in that area and hybridization will be non-uniform. When too much volume is applied, the cover slip will move easily during handling, leading to misplacement relative to the arrayed ESTs, and non-hybridization in some areas of the array.

[0174] For a 40 μl hybridization, the Cy3 and Cy5 labeled cDNAs were pooled into a single 0.2 ml thin wall PCR tube and the volume was adjusted to 30 μl by either adding DEPC H₂O, or removing water in a SpeedVac. If a vacuum device was used to remove water, high heat or heat lamps were not used to accelerate evaporation because the fluorescent dyes could be degraded.

[0175] For a 40 μl hybridization the following components were combined:

| | High Sample | High Array |
|---|---|---|
| | Blocking | Blocking |
| Cy5 + Cy3 probe | 30 μl | 28 μl |
| Poly d(A) (8 mg/ml) | 1 μl | 2 μl |
| Yeast tRNA (4 mg/ml) | 1 μl | 2 μl |
| Human C0t-1 DNA (10 mg/ml) | 1 μl | 0 μl |
| 20x SSC | 6 μl | 6 μl |
| 50x Denhardt's blocking solution | 1 μl (optional) | 2 μl |
| Total volume | 40 ul | 40 ul |

[0176] Arrays and samples can vary somewhat, making it necessary to vary the composition of the hybridization cocktail. In cases where there is residual hybridization to control repeat DNA samples on the array, more C0t-1 DNA was used, as in the High Sample Blocking formulation. When there is diffuse background or a general haze on all of the array elements, more of the non-specific blocker components was used, as in the High Array Blocking formulation.

[0177] The components were mixed well by pipetting, heated at 98° C. for 2 minutes in a PCR cycler, cooled quickly to 25° C. and 0.6 ul of 10% SDS was added. It was then centrifuged for 5 min at 14,000×g. The fluor labeled cDNAs have a tendency to form small, very fluorescent, aggregates which result in bright, punctate background on the array slide. Hard centrifugation will pellet these aggregates, allowing you to avoid introducing them to the array.

[0178] The labeled cDNA was applied to a 24 mm×50 mm glass cover slip and then touched with the inverted microarray. Applying the hybridization mix to the array and cover slipping it is an operation which requires some dexterity to get the positioning of the cover slip and the exclusion of air bubbles just right. It was helpful to practice this operation with buffer and plain slides before attempting actual samples. The hybridization solution was added to the cover slip first, since some aggregates of fluor remain in the solution and will bind to the first surface they touch.

[0179] The slide was then placed in a microarray hybridization chamber, 5 μl of 3×SSC was added to the reservoir, if the chamber provided one, or at the scribed end of the slide and the chamber was sealed. The chamber was submerged in a 65° C. water bath and the slide was allowed to hybridize for 16-20 hours. There are a wide variety of commercial hybridization chambers. It was worthwhile to prepare a mock hybridization with a blank slide, load it in the chamber and incubate it to test for leaks, or drying of the hybridization fluid, either of which cause severe fluorescent noise on the array.

[0180] Next, the unbound fluorescent cDNA was washed off. The hybridization chamber was removed from the water bath, cooled and carefully dried off. The chamber was unsealed and the slide was removed. As there may be negative pressure in the chamber after cooling, it is necessary to remove water from around the seals so that it was not pulled into the chamber and onto the slide when the seals are loosened.

[0181] The slide was placed, with the cover slip still affixed, into a Coplin jar filled with 0.5×SSC/0.01% SDS wash buffer. The cover slip was allowed to fall from the slide and then removed from the jar with a forceps. The slide was allowed to wash for 2-5 minutes. The slide was transferred to a fresh Coplin jar filled with 0.06×SSC, and allowed to wash for 2-5 minutes. The sequence of washes may need to be adjusted to allow for more aggressive noise removal, depending on the source of the sample RNA. Useful variations are to add a first wash which is 0.5×SSC/0.1% SDS or to repeat the normal first wash twice.

[0182] The slide was then transferred to a slide rack and centrifuged at low rpm (700-1000) for 3 minutes in a clinical centrifuge equipped with a horizontal rotor for microtiter plates. If the slide is simply air dried, it frequently acquires a fluorescent haze. Centrifuging off the liquids results in a lower fluorescent background. As the rate of drying can be quite rapid, it is suggested that the slide be placed in the centrifuge immediately upon removal from the Coplin jar.

[0183] Image analysis was performed using DeArray software (Chen, Y., Dougherty, E. R. and Bittner, M. L. Ratio-based decisions and the quantitative analysis of cDNA microarray images, Biomedical Optics 2, 364-374 (1997).

### Example 3

### Data Analysis

[0184] To calibrate ANN models to recognize cancers in each of the four SRBCT categories, gene-expression data from cDNA microarrays as obtained via Examples 1 and 2 above were used. The 63 training samples included both tumor biopsy material (13 EWS and 10 RMS) and cell lines (10 EWS, 10 RMS, 12 NB and 8 Burkitt lymphomas (BL; a subset of BL). For two samples, ST486 (BL-C2 and C4) and GICAN (NB-C2 and C7), we performed two independent microarray experiments to test the reproducibility of the experiments and these were subsequently treated as separate samples.

[0185] Genes were filtered based on the intensity of the fluorescence gathered from the cDNA microarray. This type of filtering was designed to remove spots for which image analysis failed. Genes were filtered by requiring that a gene have a red intensity greater than 20 across all experiments. The number of genes that passed this filter was 2308. Each slide was normalized across all experiments. Therefore the expression level was based on a relative (or normalized) red intensity (RRI) for each gene, RRI=mean intensity of that spot/mean intensity of filtered genes. The natural logarithm (ln) of RRI was used as a measure of the expression levels.

[0186] Principal component analysis (PCA) further reduced the dimensionality. To allow for a supervised regression model with no over-training (when we have low number of parameters as compared to the number of samples), the dimensionality of the samples was reduced by PCA using centralized In (RRI) values as input. Thus each sample was represented by 88 numbers, which are the results of projection of the gene expressions using PCA eigenvectors. We used the 10 dominant PCA components for subsequent analysis. These 10 dominant components contained 63% of the variance in the data matrix. The remaining PCA components contained variance unrelated to separating the four cancers.

[0187] We classified the training samples in the 4 categories using a 3-fold cross validation procedure: the 63 training (labeled) samples were randomly shuffled and split into 3 equally sized groups. Each linear ANN model was then calibrated with the 10 PCA input variables (normalized to centralized z-scores) using 2 of the groups, with the third group reserved for testing predictions (validation). This procedure was repeated 3 times, each time with a different group used for validation. The random shuffling was redone 1250 times and for each shuffling we analyzed 3 ANN models. Thus, in total, each sample belonged to a validation set 1250 times, and 3750 ANN models were calibrated. The three-fold cross-validation procedure produced at total of 3750 ANN models, and the training and validation was successful, see FIG. 5.

[0188] In addition, there was no sign of ‘over-training’ of the models, as would be shown by a rise in the summed square error for the validation set with increasing training iterations or ‘epochs’, see FIG. 4.

[0189] For each diagnostic category (EWS, RMS, NB or BL), each ANN model gave an output between 0 (not this category) and 1 (this category). The 1250 outputs for each validation sample were used as a committee as follows. We calculated the average of all the predicted outputs (a committee vote) and then a sample was classified as a particular cancer if it received the highest committee vote for that cancer. In clinical settings, it is important to be able to reject a diagnostic classification including samples not belonging to any of the four diagnoses. Therefore, to be able to reject classification we did as follows. A squared Euclidean distance was computed for each cancer type, between the committee vote for a sample and the ‘ideal’ output for that cancer type; normalized such that it is unity between cancer types as described above. Using the 1250 ANN models for each validation sample we constructed for each cancer type an empirical probability distribution for the distances. Using these distributions, samples are only diagnosed as a specific cancer if they lie within the 95th percentile. All 3750 models were used to classify the additional 25 test samples.

[0190] Using these ANN models, all of the 63 training samples were correctly assigned/classified to their respective categories, having received the highest committee vote (average output) for that category.

[0191] Diagnostic results for the 63 training samples can be seen in Table 4 below.

TABLE 4
Training sample characteristics

[chemical structure]

[chemical structure]

[chemical structure]

[chemical structure]

Source label refers to the original name of the sample as labeled by the source. Histological diagnosis is defined as cancer type suffixed with -T for a tumor sample and -C for a cell line. Highlighted in gray is the ANN classification of the samples. NCI: National Cancer Institute, National Institutes of Health, ATCC: American Type Culture Collection, MSKCC: Memorial Sloan-Kettering Cancer Center, CHTN: Cooperative Human Tissue Network.

### Example 4

### Optimization of Genes Utilized for Classification

[0192] The contribution of each gene to the classification by the ANN models was determined by measuring the sensitivity of the classification to a change in the expression level of each gene, using the 3750 previously calibrated models.

[0193] The sensitivity to the different genes was determined by the absolute value of the partial derivative of the output with respect to the gene expressions, averaged over samples and ANN models. A large sensitivity implied that changing the expression influences the output significantly.

[0194] In this way the genes were ranked according to their significance for the classification. The top 200 ranked genes are seen below in Table 5. The weight of each gene is the sensitivity measurement as calculated by Equation (2), page 19 above

TABLE 5

| | Unique | | Unigene | | |
|---|---|---|---|---|---|
| Rank | Image_Id | Name of Gene | number | Weight | SEQ. ID. NO. |
| 1 | 296448 | “insulin-like growth factor 2 | Hs.251664 | 1.00 +− 0.03 | SEQ. ID. NO. 72 |
| | | (somatomedin A)” | | | |
| 2 | 207274 | “insulin-like growth factor 2 | Hs.251664 | 0.97 +− 0.03 | SEQ. ID. NO. 73 |
| | | (somatomedin A)” | | | |
| 3 | 295985 | “Homo sapiens cDNA FLJ20653 fis, | Hs.180059 | 0.87 +− 0.02 | SEQ. ID. NO. 26 |
| | | clone KAT01739” | | | |
| 4 | 41591 | “meningioma (disrupted in balanced | Hs.268515 | 0.86 +− 0.02 | SEQ. ID. NO. 60 |
| | | translocation) 1” | | | |
| 5 | 365826 | “growth arrest-specific 1” | Hs.65029 | 0.86 +− 0.02 | SEQ. ID. NO. 59 |
| 6 | 714453 | “interleukin 4 receptor” | Hs.75545 | 0.85 +− 0.02 | SEQ. ID. NO. 83 |
| 7 | 812965 | “v-myc avian myelocytomatosis viral | Hs.79070 | 0.81 +− 0.02 | SEQ. ID. NO. 82 |
| | | oncogene homolog” | | | |
| 8 | 486787 | “calponin 3, acidic” | Hs.194662 | 0.81 +− 0.02 | SEQ. ID. NO. 43 |
| 9 | 244618 | “ESTs” | Hs.15463 | 0.80 +− 0.02 | SEQ. ID. NO. 77 |
| 10 | 417226 | “v-myc avian myelocytomatosis viral | Hs.79070 | 0.80 +− 0.02 | SEQ. ID. NO. 81 |
| | | oncogene homolog” | | | |
| 11 | 840942 | “major histocompatibility complex, class | Hs.814 | 0.79 +− 0.02 | SEQ. ID. NO. 87 |
| | | II, DP beta 1” | | | |
| 12 | 770394 | “Fc fragment of IgG, receptor, transporter, | Hs.160741 | 0.78 +− 0.02 | SEQ. ID. NO. 20 |
| | | alpha” | | | |
| 13 | 812105 | “ALL1-fused gene from chromosome 1q” | Hs.75823 | 0.76 +− 0.02 | SEQ. ID. NO. 32 |
| 14 | 357031 | “tumor necrosis factor, alpha-induced | Hs.29352 | 0.75 +− 0.02 | SEQ. ID. NO. 18 |
| | | protein 6” | | | |
| 15 | 629896 | “microtubule-associated protein 1B” | Hs.103042 | 0.74 +− 0.02 | SEQ. ID. NO. 37 |
| 16 | 308163 | “ESTs” | Hs.84520 | 0.73 +− 0.02 | SEQ. ID. NO. 57 |
| 17 | 43733 | “glycogenin 2” | Hs.58589 | 0.72 +− 0.02 | SEQ. ID. NO. 21 |
| 18 | 489631 | “chondroitin sulfate proteoglycan 2 | Hs.81800 | 0.71 +− 0.02 | SEQ. ID. NO. 100 |
| | | (versican)” | | | |
| 19 | 866702 | “protein tyrosine phosphatase, non- | Hs.211595 | 0.71 +− 0.02 | SEQ. ID. NO. 16 |
| | | receptor type 13 (APO-1/CD95 (Fas)- | | | |
| | | associated phosphatase)” | | | |
| 20 | 377461 | “caveolin 1, caveolae protein, 22 kD” | Hs.281621 | 0.70 +− 0.02 | SEQ. ID. NO. 19 |
| 21 | 324494 | “heat shock 27 kD protein 2” | Hs.78846 | 0.69 +− 0.02 | SEQ. ID. NO. 62 |
| 22 | 80109 | “major histocompatibility complex, class | Hs.198253 | 0.69 +− 0.02 | SEQ. ID. NO. 88 |
| | | II, DQ alpha 1” | | | |
| 23 | 39093 | “methionine aminopeptidase; eIF-2- | Hs.78935 | 0.69 +− 0.01 | SEQ. ID. NO. 63 |
| | | associated p67” | | | |
| 24 | 82225 | “secreted frizzled-related protein 1” | Hs.7306 | 0.67 +− 0.01 | SEQ. ID. NO. 42 |
| 25 | 308231 | “Homo sapiens cDNA FLJ20153 fis, | Hs.109805 | 0.67 +− 0.02 | SEQ. ID. NO. 39 |
| | | clone COL08656, highly similar to | | | |
| | | AJ001381 Homo sapiens incomplete | | | |
| | | cDNA for a mutated allele” | | | |
| 26 | 211758 | “ribosomal protein S23” | Hs.3463 | 0.67 +− 0.01 | SEQ. ID. NO. 101 |
| 27 | 1E+06 | “troponin T1, skeletal, slow” | Hs.73980 | 0.66 +− 0.02 | SEQ. ID. NO. 70 |
| 28 | 878280 | “collapsin response mediator protein 1” | Hs.155392 | 0.65 +− 0.02 | SEQ. ID. NO. 33 |
| 29 | 383188 | “recoverin” | Hs.80539 | 0.64 +− 0.01 | SEQ. ID. NO. 38 |
| 30 | 795877 | “serum-inducible kinase” | Hs.3838 | 0.64 +− 0.01 | SEQ. ID. NO. 102 |
| 31 | 784593 | “ESTs” | Hs.6838 | 0.63 +− 0.01 | SEQ. ID. NO. 41 |
| 32 | 135688 | “GATA-binding protein 2” | Hs.760 | 0.62 +− 0.01 | SEQ. ID. NO. 44 |
| 33 | 325182 | “cadherin 2, N-cadherin (neuronal)” | Hs.161 | 0.62 +− 0.01 | SEQ. ID. NO. 31 |
| 34 | 461425 | “myosin, light polypeptide 4, alkali; atrial, | Hs.154156 | 0.61 +− 0.01 | SEQ. ID. NO. 75 |
| | | embryonic” | | | |
| 35 | 1E+06 | “transducin-like enhancer of split 2, | Hs.173063 | 0.61 +− 0.02 | SEQ. ID. NO. 15 |
| | | homolog of Drosophila E(sp1)” | | | |
| 36 | 298062 | “troponin T2, cardiac” | Hs.89749 | 0.61 +− 0.02 | SEQ. ID. NO. 74 |
| 37 | 841641 | “cyclin D1 (PRAD1: parathyroid | Hs.82932 | 0.61 +− 0.01 | SEQ. ID. NO. 5 |
| | | adenomatosis 1)” | | | |
| 38 | 745343 | “regenerating islet-derived 1 alpha | Hs.1032 | 0.60 +− 0.01 | SEQ. ID. NO. 85 |
| | | (pancreatic stone protein, pancreatic thread | | | |
| | | protein)” | | | |
| 39 | 755599 | “interferon induced transmembrane | Hs.146360 | 0.59 +− 0.02 | SEQ. ID. NO. 25 |
| | | protein 1 (9-27)” | | | |
| 40 | 809901 | “collagen, type XV, alpha 1” | Hs.83164 | 0.59 +− 0.01 | SEQ. ID. NO. 67 |
| 41 | 859359 | “quinone oxidoreductase homolog” | Hs.50649 | 0.59 +− 0.01 | SEQ. ID. NO. 50 |
| 42 | 784224 | “fibroblast growth factor receptor 4” | Hs.165950 | 0.59 +− 0.02 | SEQ. ID. NO. 71 |
| 43 | 42558 | “glycine amidinotransferase (L- | Hs.75335 | 0.58 +− 0.01 | SEQ. ID. NO. 79 |
| | | arginine:glycine amidinotransferase)” | | | |
| 44 | 183337 | “major histocompatibility complex, class | Hs.77522 | 0.58 +− 0.01 | SEQ. ID. NO. 89 |
| | | II, DM alpha” | | | |
| 45 | 289645 | “amyloid beta (A4) precursor-like protein | Hs.74565 | 0.58 +− 0.01 | SEQ. ID. NO. 4 |
| | | 1” | | | |
| 46 | 377048 | “Homo sapiens cDNA FLJ20153 fis, | Hs.109805 | 0.57 +− 0.01 | SEQ. ID. NO. 40 |
| | | clone COL08656, highly similar to | | | |
| | | AJ001381 Homo sapiens incomplete | | | |
| | | cDNA for a mutated allele” | | | |
| 47 | 122159 | “collagen, type III, alpha 1 (Ehlers-Danlos | Hs.119571 | 0.57 +− 0.01 | SEQ. ID. NO. 66 |
| | | syndrome type IV, autosomal dominant)” | | | |
| 48 | 245330 | “insulin-like growth factor 2 | Hs.251664 | 0.57 +− 0.01 | SEQ. ID. NO. 78 |
| | | (somatomedin A)” | | | |
| 49 | 814260 | “follicular lymphoma variant translocation | Hs.74050 | 0.57 +− 0.01 | SEQ. ID. NO. 17 |
| | | 1” | | | |
| 50 | 824602 | “interferon, gamma-inducible protein 16” | Hs.155530 | 0.57 +− 0.01 | SEQ. ID. NO. 84 |
| 51 | 44563 | “growth associated protein 43” | Hs.79000 | 0.56 +− 0.01 | SEQ. ID. NO. 35 |
| 52 | 767495 | “GLI-Kruppel family member GLI3 | Hs.72916 | 0.56 +− 0.01 | SEQ. ID. NO. 103 |
| | | (Greig cephalopolysyndactyly syndrome)” | | | |
| 53 | 769716 | “neurofibromin 2 (bilateral acoustic | Hs.902 | 0.55 +− 0.01 | SEQ. ID. NO. 104 |
| | | neuroma)” | | | |
| 54 | 486110 | “profilin 2” | Hs.91747 | 0.55 +− 0.01 | SEQ. ID. NO. 45 |
| 55 | 1E+06 | “pim-2 oncogene” | Hs.80205 | 0.55 +− 0.01 | SEQ. ID. NO. 92 |
| 56 | 756556 | “complement component 1 inhibitor | Hs.151242 | 0.54 +− 0.01 | SEQ. ID. NO. 65 |
| | | (angioedema, hereditary)” | | | |
| 57 | 377731 | “glutathione S-transferase M5” | Hs.75652 | 0.54 +− 0.01 | SEQ. ID. NO. 23 |
| 58 | 52076 | “olfactomedin related ER localized | Hs.74376 | 0.54 +− 0.02 | SEQ. ID. NO. 13 |
| | | protein” | | | |
| 59 | 810057 | “cold shock domain protein A” | Hs.1139 | 0.54 +− 0.01 | SEQ. ID. NO. 105 |
| 60 | 233721 | “insulin-like growth factor binding protein | Hs.162 | 0.54 +− 0.01 | SEQ. ID. NO. 28 |
| | | 2 (36 kD)” | | | |
| 61 | 293500 | “ESTs” | Hs.49714 | 0.54 +− 0.01 | SEQ. ID. NO. 80 |
| 62 | 75254 | “cysteine and glycine-rich protein 2 (LIM | Hs.10526 | 0.54 +− 0.01 | SEQ. ID. NO. 106 |
| | | domain only, smooth muscle)” | | | |
| 63 | 377468 | “sprouty (Drosophila) homolog 1 | Hs.88044 | 0.53 +− 0.01 | SEQ. ID. NO. 107 |
| | | (antagonist of FGF signaling)” | | | |
| 64 | 809910 | “interferon induced transmembrane | Hs.182241 | 0.53 +− 0.01 | SEQ. ID. NO. 55 |
| | | protein 3 (1-8U)” | | | |
| 65 | 395708 | “dihydropyrimidinase-like 4” | Hs.100058 | 0.53 +− 0.01 | SEQ. ID. NO. 30 |
| 66 | 416959 | “nuclear factor I/B” | Hs.33287 | 0.53 +− 0.01 | SEQ. ID. NO. 29 |
| 67 | 1E+06 | “antigen identified by monoclonal | Hs.177543 | 0.52 +− 0.01 | SEQ. ID. NO. 22 |
| | | antibodies 12E7, F21 and O13” | | | |
| 68 | 609663 | “protein kinase, cAMP-dependent, | Hs.77439 | 0.51 +− 0.01 | SEQ. ID. NO. 95 |
| | | regulatory, type II, beta” | | | |
| 69 | 212640 | “Rho GTPase activating protein 4” | Hs.3109 | 0.51 +− 0.01 | SEQ. ID. NO. 108 |
| 70 | 130057 | “ESTs” | Hs.23057 | 0.51 +− 0.01 | SEQ. ID. NO. 109 |
| 71 | 563673 | “antiquitin 1” | Hs.74294 | 0.51 +− 0.01 | SEQ. ID. NO. 10 |
| 72 | 770059 | “heparan sulfate proteoglycan 2 | Hs.211573 | 0.51 +− 0.01 | SEQ. ID. NO. 110 |
| | | (perlecan)” | | | |
| 73 | 782503 | “Homo sapiens clone 23716 mRNA | Hs.12214 | 0.50 +− 0.01 | SEQ. ID. NO. 7 |
| | | sequence” | | | |
| 74 | 292522 | “ESTs” | Hs.38022 | 0.50 +− 0.01 | SEQ. ID. NO. 36 |
| 75 | 365515 | “fibroblast growth factor 7 (keratinocyte | Hs.164568 | 0.50 +− 0.01 | SEQ. ID. NO. 111 |
| | | growth factor)” | | | |
| 76 | 1E+06 | “cysteine-rich protein 1 (intestinal)” | Hs.17409 | 0.50 +− 0.01 | SEQ. ID. NO. 112 |
| 77 | 767183 | “hematopoietic cell-specific Lyn substrate | Hs.14601 | 0.50 +− 0.01 | SEQ. ID. NO. 91 |
| | | 1” | | | |
| 78 | 811000 | “lectin, galactoside-binding, soluble, 3 | Hs.79339 | 0.50 +− 0.01 | SEQ. ID. NO. 6 |
| | | binding protein (galectin 6 binding | | | |
| | | protein)” | | | |
| 79 | 308497 | “KIAA0467 protein” | Hs.11147 | 0.49 +− 0.01 | SEQ. ID. NO. 24 |
| 80 | 80338 | “selenium binding protein 1” | Hs.7833 | 0.49 +− 0.01 | SEQ. ID. NO. 14 |
| 81 | 200814 | “membrane metallo-endopeptidase | Hs.1298 | 0.49 +− 0.01 | SEQ. ID. NO. 94 |
| | | (neutral endopeptidase, enkephalinase, | | | |
| | | CALLA, CD10)” | | | |
| 82 | 898219 | “mesoderm specific transcript (mouse) | Hs.79284 | 0.49 +− 0.01 | SEQ. ID. NO. 113 |
| | | homolog” | | | |
| 83 | 796258 | “sarcoglycan, alpha (50 kD dystrophin- | Hs.99931 | 0.49 +− 0.01 | SEQ. ID. NO. 76 |
| | | associated glycoprotein)” | | | |
| 84 | 377671 | “integrin, alpha 7” | Hs.74369 | 0.48 +− 0.01 | SEQ. ID. NO. 68 |
| 85 | 839736 | “crystallin, alpha B” | Hs.1940 | 0.48 +− 0.01 | SEQ. ID. NO. 61 |
| 86 | 208718 | “annexin A1” | Hs.78225 | 0.48 +− 0.01 | SEQ. ID. NO. 2 |
| 87 | 32299 | “inositol(myo)-1(or 4)-monophosphatase | Hs.5753 | 0.48 +− 0.01 | SEQ. ID. NO. 114 |
| | | 2” | | | |
| 88 | 246377 | “EST” | Hs.102670 | 0.48 +− 0.01 | SEQ. ID. NO. 51 |
| 89 | 413633 | “EST” | — | 0.48 +− 0.01 | SEQ. ID. NO. 115 |
| 90 | 140806 | “peptidylglycine alpha-amidating | Hs.83920 | 0.47 +− 0.01 | SEQ. ID. NO. 116 |
| | | monooxygenase” | | | |
| 91 | 294496 | “ESTs” | Hs.23037 | 0.47 +− 0.01 | SEQ. ID. NO. 117 |
| 92 | 755750 | “non-metastatic cells 2, protein (NM23B) | Hs.275163 | 0.47 +− 0.01 | SEQ. ID. NO. 49 |
| | | expressed in” | | | |
| 93 | 811108 | “thyroid hormone receptor interactor 6” | Hs.119498 | 0.47 +− 0.01 | SEQ. ID. NO. 118 |
| 94 | 246035 | “ESTs” | Hs.78026 | 0.47 +− 0.01 | SEQ. ID. NO. 119 |
| 95 | 796904 | “pleomorphic adenoma gene-like 1” | Hs.75825 | 0.47 +− 0.01 | SEQ. ID. NO. 120 |
| 96 | 788107 | “bridging integrator 1” | Hs.193163 | 0.47 +− 0.01 | SEQ. ID. NO. 52 |
| 97 | 714106 | “plasminogen activator, urokinase” | Hs.77274 | 0.47 +− 0.01 | SEQ. ID. NO. 121 |
| 98 | 842918 | “FERM, RhoGEF (ARHGEF) and | Hs.183738 | 0.47 +− 0.01 | SEQ. ID. NO. 122 |
| | | pleckstrin domain protein 1 (chondrocyte- | | | |
| | | derived)” | | | |
| 99 | 788472 | “nucleobindin 1” | Hs.172609 | 0.47 +− 0.01 | SEQ. ID. NO. 123 |
| 100 | 52096 | “platelet-derived growth factor receptor, | Hs.74615 | 0.46 +− 0.01 | SEQ. ID. NO. 124 |
| | | alpha polypeptide” | | | |
| 101 | 823886 | “Smooth muscle myosin heavy chain | Hs.2094 | 0.46 +− 0.01 | SEQ. ID. NO. 125 |
| | | isoform SMemb [human, umbilical cord, | | | |
| | | fetal aorta, mRNA Partial, 971 nt]” | | | |
| 102 | 782193 | “thioredoxin” | Hs.76136 | 0.46 +− 0.01 | SEQ. ID. NO. 126 |
| 103 | 214990 | “gelsolin (amyloidosis, Finnish type)” | Hs.80562 | 0.46 +− 0.01 | SEQ. ID. NO. 127 |
| 104 | 144932 | “deleted in oral cancer (mouse, homolog) | Hs.3436 | 0.46 +− 0.01 | SEQ. ID. NO. 128 |
| | | 1” | | | |
| 105 | 782811 | “high-mobility group (nonhistone | Hs.139800 | 0.46 +− 0.01 | SEQ. ID. NO. 129 |
| | | chromosomal) protein isoforms I and Y” | | | |
| 106 | 813698 | “sprouty (Drosophila) homolog 2” | Hs.18676 | 0.45 +− 0.01 | SEQ. ID. NO. 130 |
| 107 | 212542 | “Homo sapiens mRNA; cDNA | Hs.21851 | 0.45 +− 0.01 | SEQ. ID. NO. 53 |
| | | DKFZp586J2118 (from clone | | | |
| | | DKFZp586J2118)” | | | |
| 108 | 204545 | “ESTs” | Hs.8966 | 0.45 +− 0.01 | SEQ. ID. NO. 58 |
| 109 | 341588 | “CGI-119 protein” | Hs.25615 | 0.45 +− 0.01 | SEQ. ID. NO. 131 |
| 110 | 297392 | “metallothionein 1L” | Hs.94360 | 0.45 +− 0.01 | SEQ. ID. NO. 93 |
| 111 | 813841 | “plasminogen activator, tissue” | Hs.274404 | 0.45 +− 0.01 | SEQ. ID. NO. 132 |
| 112 | 491692 | “collagen, type IV, alpha 1” | Hs.119129 | 0.44 +− 0.01 | SEQ. ID. NO. 133 |
| 113 | 142134 | “hypothetical protein FLJ20185” | Hs.272972 | 0.44 +− 0.01 | SEQ. ID. NO. 134 |
| 114 | 214572 | “ESTs” | Hs.280460 | 0.44 +− 0.01 | SEQ. ID. NO. 135 |
| 115 | 878182 | “alpha-2-macroglobulin” | Hs.74561 | 0.44 +− 0.01 | SEQ. ID. NO. 136 |
| 116 | 360047 | “SWI/SNF related, matrix associated, | Hs.77069 | 0.44 +− 0.01 | SEQ. ID. NO. 137 |
| | | actin dependent regulator of chromatin, | | | |
| | | subfamily d, member 3” | | | |
| 117 | 878652 | “procollagen C-endopeptidase enhancer” | Hs.202097 | 0.44 +− 0.01 | SEQ. ID. NO. 138 |
| 118 | 450152 | “Meis (mouse) homolog 3” | Hs.117313 | 0.44 +− 0.01 | SEQ. ID. NO. 139 |
| 119 | 45542 | “Human insulin-like growth factor binding | Hs.103391 | 0.44 +− 0.01 | SEQ. ID. NO. 64 |
| | | protein 5 (IGFBP5) mRNA” | | | |
| 120 | 742132 | “interferon-stimulated protein, 15 kDa” | Hs.833 | 0.44 +− 0.01 | SEQ. ID. NO. 140 |
| 121 | 82903 | “TAP binding protein (tapasin)” | Hs.179600 | 0.44 +− 0.01 | SEQ. ID. NO. 141 |
| 122 | 773215 | “runt-related transcription factor 1 (acute | Hs.129914 | 0.44 +− 0.01 | SEQ. ID. NO. 142 |
| | | myeloid leukemia 1; aml1 oncogene)” | | | |
| 123 | 789253 | “presenilin 2 (Alzheimer disease 4)” | Hs.25363 | 0.44 +− 0.01 | SEQ. ID. NO. 143 |
| 124 | 814526 | “seb4D” | Hs.236361 | 0.44 +− 0.01 | SEQ. ID. NO. 96 |
| 125 | 435953 | “inositol 1,4,5-triphosphate receptor, type | Hs.77515 | 0.44 +− 0.01 | SEQ. ID. NO. 144 |
| | | 3” | | | |
| 126 | 245860 | “Homo sapiens mRNA; cDNA | Hs.181104 | 0.44 +− 0.01 | SEQ. ID. NO. 145 |
| | | DKFZp564H1916 (from clone | | | |
| | | DKFZp564H1916)” | | | |
| 127 | 159455 | “similar to vaccinia virus HindIII K4L | Hs.74573 | 0.44 +− 0.01 | SEQ. ID. NO. 146 |
| | | ORF” | | | |
| 128 | 220096 | “—” | — | 0.44 +− 0.01 | SEQ. ID. NO. 147 |
| 129 | 45291 | “dentatorubral-pallidoluysian atrophy | Hs.169488 | 0.43 +− 0.01 | SEQ. ID. NO. 54 |
| | | (atrophin-1)” | | | |
| 130 | 241412 | “E74-like factor 1 (ets domain | Hs.154365 | 0.43 +− 0.01 | SEQ. ID. NO. 90 |
| | | transcription factor)” | | | |
| 131 | 1E+06 | “matrix metalloproteinase 2 (gelatinase A, | Hs.111301 | 0.43 +− 0.01 | SEQ. ID. NO. 148 |
| | | 72 kD gelatinase, 72 kD type IV | | | |
| | | collagenase)” | | | |
| 132 | 250654 | “secreted protein, acidic, cysteine-rich | Hs.111779 | 0.43 +− 0.01 | SEQ. ID. NO. 149 |
| | | (osteonectin)” | | | |
| 133 | 343867 | “allograft inflammatory factor 1” | Hs.76364 | 0.43 +− 0.01 | SEQ. ID. NO. 150 |
| 134 | 234237 | “Pirin” | Hs.279663 | 0.42 +− 0.01 | SEQ. ID. NO. 151 |
| 135 | 713922 | “glutathione S-transferase M1” | Hs.278633 | 0.42 +− 0.01 | SEQ. ID. NO. 152 |
| 136 | 823928 | “glutathione S-transferase theta 2” | Hs.1581 | 0.42 +− 0.01 | SEQ. ID. NO. 153 |
| 137 | 810504 | “proteolipid protein 2 (colonic epithelium- | Hs.77422 | 0.42 +− 0.01 | SEQ. ID. NO. 154 |
| | | enriched)” | | | |
| 138 | 788511 | “ribosomal protein S6 kinase, 90 kD, | Hs.149957 | 0.41 +− 0.01 | SEQ. ID. NO. 155 |
| | | polypeptide 1” | | | |
| 139 | 471266 | “DiGeorge syndrome critical region gene | Hs.153910 | 0.41 +− 0.01 | SEQ. ID. NO. 156 |
| | | 6” | | | |
| 140 | 299737 | “Homo sapiens clone 24411 mRNA | Hs.20952 | 0.41 +− 0.01 | SEQ. ID. NO. 157 |
| | | sequence” | | | |
| 141 | 740554 | “Homo sapiens mRNA; cDNA | Hs.263671 | 0.41 +− 0.01 | SEQ. ID. NO. 158 |
| | | DKFZp434I0812 (from clone | | | |
| | | DKFZp434I0812); partial cds” | | | |
| 142 | 754600 | “nuclear factor I/X (CCAAT-binding | Hs.35841 | 0.41 +− 0.01 | SEQ. ID. NO. 159 |
| | | transcription factor)” | | | |
| 143 | 151261 | “ESTs” | Hs.237971 | 0.41 +− 0.01 | SEQ. ID. NO. 160 |
| 144 | 815239 | “Rho guanine nucleotide exchange factor | Hs.252280 | 0.41 +− 0.01 | SEQ. ID. NO. 161 |
| | | (GEF) 1” | | | |
| 145 | 624360 | “proteasome (prosome, macropain) | Hs.180062 | 0.41 +− 0.01 | SEQ. ID. NO. 162 |
| | | subunit, beta type, 8 (large multifunctional | | | |
| | | protease 7)” | | | |
| 146 | 213136 | “BTG family, member 2” | Hs.75462 | 0.41 +− 0.01 | SEQ. ID. NO. 163 |
| 147 | 21652 | “catenin (cadherin-associated protein), | Hs.178452 | 0.41 +− 0.01 | SEQ. ID. NO. 56 |
| | | alpha 1 (102 kD)” | | | |
| 148 | 813266 | “four and a half LIM domains 1” | Hs.239069 | 0.41 +− 0.01 | SEQ. ID. NO. 47 |
| 149 | 236282 | “Wiskott-Aldrich syndrome (ecezema- | Hs.2157 | 0.41 +− 0.01 | SEQ. ID. NO. 164 |
| | | thrombocytopenia)” | | | |
| 150 | 755228 | “dynamin 1” | Hs.166161 | 0.41 +− 0.01 | SEQ. ID. NO. 165 |
| 151 | 161993 | “CCAAT/enhancer binding protein | Hs.99029 | 0.41 +− 0.01 | SEQ. ID. NO. 166 |
| | | (C/EBP), beta” | | | |
| 152 | 358433 | “retinoid X receptor, gamma” | Hs.26550 | 0.41 +− 0.01 | SEQ. ID. NO. 167 |
| 153 | 841620 | “dihydropyrimidinase-like 2” | Hs.173381 | 0.41 +− 0.01 | SEQ. ID. NO. 8 |
| 154 | 293859 | “Putative prostate cancer tumor | Hs.71119 | 0.41 +− 0.01 | SEQ. ID. NO. 168 |
| | | suppressor” | | | |
| 155 | 190887 | “myeloid differentiation primary response | Hs.82116 | 0.41 +− 0.01 | SEQ. ID. NO. 169 |
| | | gene (88)” | | | |
| 156 | 362483 | “spectrin, beta, non-erythrocytic 1” | Hs.107164 | 0.41 +− 0.01 | SEQ. ID. NO. 170 |
| 157 | 139376 | “hypothetical protein” | Hs.91973 | 0.40 +− 0.01 | SEQ. ID. NO. 171 |
| 158 | 786084 | “chromobox homolog 1 (Drosophila HP1 | Hs.77254 | 0.40 +− 0.01 | SEQ. ID. NO. 172 |
| | | beta)” | | | |
| 159 | 193182 | “transforming, acidic coiled-coil | Hs.173159 | 0.40 +− 0.01 | SEQ. ID. NO. 173 |
| | | containing protein 1” | | | |
| 160 | 768246 | “glucose-6-phosphate dehydrogenase” | Hs.80206 | 0.40 +− 0.01 | SEQ. ID. NO. 174 |
| 161 | 774502 | “protein tyrosine phosphatase, non- | Hs.62 | 0.40 +− 0.01 | SEQ. ID. NO. 175 |
| | | receptor type 12” | | | |
| 162 | 868304 | “actin, alpha 2, smooth muscle, aorta” | Hs.195851 | 0.40 +− 0.01 | SEQ. ID. NO. 86 |
| 163 | 379708 | “chromodomain helicase DNA binding | Hs.25601 | 0.40 +− 0.01 | SEQ. ID. NO. 176 |
| | | protein 3” | | | |
| 164 | 504791 | “glutathione S-transferase A4” | Hs.169907 | 0.40 +− 0.01 | SEQ. ID. NO. 11 |
| 165 | 755506 | “annexin A4” | Hs.77840 | 0.40 +− 0.01 | SEQ. ID. NO. 177 |
| 166 | 1E+06 | “homeo box B7” | Hs.819 | 0.40 +− 0.01 | SEQ. ID. NO. 178 |
| 167 | 824704 | “mannose phosphate isomerase” | Hs.75694 | 0.40 +− 0.01 | SEQ. ID. NO. 179 |
| 168 | 770014 | “T cell receptor alpha locus” | Hs.74647 | 0.40 +− 0.01 | SEQ. ID. NO. 180 |
| 169 | 22040 | “matrix metalloproteinase 9 (gelatinase B, | Hs.151738 | 0.40 +− 0.01 | SEQ. ID. NO. 181 |
| | | 92 kD gelatinase, 92 kD type IV | | | |
| | | collagenase)” | | | |
| 170 | 66714 | “peanut (Drosophila)-like 2” | Hs.155524 | 0.40 +− 0.01 | SEQ. ID. NO. 182 |
| 171 | 172783 | “hypothetical protein FLJ10390” | Hs.133475 | 0.40 +− 0.01 | SEQ. ID. NO. 183 |
| 172 | 273435 | “v-yes-1 Yamaguchi sarcoma viral | Hs.194148 | 0.40 +− 0.01 | SEQ. ID. NO. 184 |
| | | oncogene homolog 1” | | | |
| 173 | 323371 | “amyloid beta (A4) precursor protein | Hs.177486 | 0.39 +− 0.01 | SEQ. ID. NO. 27 |
| | | (protease nexin-II, Alzheimer disease)” | | | |
| 174 | 344134 | “immunoglobulin lambda-like polypeptide | Hs.170116 | 0.39 +− 0.01 | SEQ. ID. NO. 185 |
| | | 3” | | | |
| 175 | 291756 | “tubulin, beta, 5” | Hs.108014 | 0.39 +− 0.01 | SEQ. ID. NO. 1 |
| 176 | 47475 | “p53 inducible protein” | Hs.258503 | 0.39 +− 0.01 | SEQ. ID. NO. 186 |
| 177 | 760299 | “Dickkopf gene 3” | Hs.4909 | 0.39 +− 0.01 | SEQ. ID. NO. 187 |
| 178 | 24415 | “tumor protein p53 (Li-Fraumeni | Hs.1846 | 0.39 +− 0.01 | SEQ. ID. NO. 188 |
| | | syndrome)” | | | |
| 179 | 727251 | “CD9 antigen (p24)” | Hs.1244 | 0.39 +− 0.01 | SEQ. ID. NO. 189 |
| 180 | 770868 | “NGFI-A binding protein 2 (ERG1 | Hs.159223 | 0.39 +− 0.01 | SEQ. ID. NO. 190 |
| | | binding protein 2)” | | | |
| 181 | 364934 | “death-associated protein kinase 1” | Hs.153924 | 0.39 +− 0.01 | SEQ. ID. NO. 12 |
| 182 | 1E+06 | “creatine kinase, brain” | Hs.173724 | 0.39 +− 0.01 | SEQ. ID. NO. 191 |
| 183 | 769959 | “collagen, type IV, alpha 2” | Hs.75617 | 0.39 +− 0.01 | SEQ. ID. NO. 69 |
| 184 | 144797 | “a disintegrin-like and metalloprotease | Hs.8230 | 0.39 +− 0.01 | SEQ. ID. NO. 192 |
| | | (reprolysin type) with thrombospondin | | | |
| | | type 1 motif, 1” | | | |
| 185 | 108351 | “Homo sapiens cDNA FLJ11302 fis, | Hs.13781 | 0.38 +− 0.01 | SEQ. ID. NO. 193 |
| | | clone PLACE1009971” | | | |
| 186 | 51448 | “activating transcription factor 3” | Hs.460 | 0.38 +− 0.01 | SEQ. ID. NO. 194 |
| 187 | 301122 | “extracellular matrix protein 1” | Hs.81071 | 0.38 +− 0.01 | SEQ. ID. NO. 195 |
| 188 | 814798 | “aldehyde dehydrogenase 6” | Hs.75746 | 0.38 +− 0.01 | SEQ. ID. NO. 196 |
| 189 | 788695 | “troponin T3, skeletal, fast” | Hs.73454 | 0.38 +− 0.01 | SEQ. ID. NO. 197 |
| 190 | 769028 | “mesenchyme homeo box 1” | Hs.438 | 0.38 +− 0.01 | SEQ. ID. NO. 198 |
| 191 | 811028 | “cathepsin D (lysosomal aspartyl | Hs.79572 | 0.38 +− 0.01 | SEQ. ID. NO. 199 |
| | | protease)” | | | |
| 192 | 196992 | “aldo-keto reductase family 1, member C1 | Hs.275374 | 0.38 +− 0.01 | SEQ. ID. NO. 200 |
| | | (dihydrodiol dehydrogenase 1; 20-alpha | | | |
| | | (3-alpha)-hydroxysteroid dehydrogenase)” | | | |
| 193 | 586854 | “CGI-119 protein” | Hs.25615 | 0.38 +− 0.01 | SEQ. ID. NO. 201 |
| 194 | 1E+06 | “ATPase, Na+/K+ transporting, alpha 1 | Hs.190703 | 0.38 +− 0.01 | SEQ. ID. NO. 202 |
| | | polypeptide” | | | |
| 195 | 752652 | “transcription factor 7-like 2 (T-cell | Hs.154485 | 0.38 +− 0.01 | SEQ. ID. NO. 203 |
| | | specific, HMG-box)” | | | |
| 196 | 813168 | “ESTs” | Hs.59896 | 0.38 +− 0.01 | SEQ. ID. NO. 204 |
| 197 | 143306 | “lymphocyte-specific protein 1” | Hs.56729 | 0.38 +− 0.01 | SEQ. ID. NO. 205 |
| 198 | 810551 | “low density lipoprotein-related protein 1 | Hs.89137 | 0.37 +− 0.01 | SEQ. ID. NO. 206 |
| | | (alpha-2-macroglobulin receptor)” | | | |
| 199 | 882506 | “lysyl oxidase-like 2” | Hs.83354 | 0.37 +− 0.01 | SEQ. ID. NO. 207 |
| 200 | 141768 | “v-erb-b2 avian erythroblastic leukemia | Hs.173664 | 0.37 +− 0.01 | SEQ. ID. NO. 208 |
| | | viral oncogene homolog 2 | | | |
| | | (neuro/glioblastoma derived oncogene | | | |
| | | homolog)” | | | |

[0195] The ANN analysis utilized in this example has lead to the identification of genes specific for each of the four cancers (EWS, RMS, NB and BL), with implications for biology and therapy, a strength of this method is its lack of requirement for genes to be exclusively associated with a single cancer type. The top 96 discriminating genes included not only those that had high (61) or low levels (12 BLs and 1 EWS) of expression in one particular cancer, but also genes that were differentially expressed in two diagnostic categories as compared to the remaining two. The genes that are not exclusively expressed in two cancer types can be used for diagnosis (to separate these two from the other cancers) and are potential targets for these both these cancers.

[0196] As expected, our method identified genes related to tumor histogenesis, but includes genes that may not normally be expressed in the corresponding mature tissue. Of the 16 genes highly expressed only in EWS, two (MIC2 (SEQ. ID. NO. 22) and GYG2 (SEQ. ID. NO. 21)) have been previously described. Of the 14 genes that have not previously been reported to be highly expressed in EWS, four (TUBB5 (SEQ. ID. NO. 1), ANXA1 (SEQ. ID. NO. 2), NOE1 (SEQ. ID. NO. 13) and GSTM5 (SEQ. ID. NO. 23)) were neural specific genes lending more credence to the proposed neural histogenesis of EWS. Twenty genes were highly expressed only in RMS, including 8 specific for muscle tissue and 5 (FGFR4 (SEQ. ID. NO. 71), IGF2 (SEQ. ID. NO. 72), MYL4 (SEQ. ID. NO. 75), ITGA7 (SEQ. ID. NO. 68), and IGFBP5 (SEQ. ID. NO. 64)) related to myogenesis. Among the latter, IGF2 (SEQ. ID. NO. 72), MYL4 (SEQ. ID. NO. 75) and IGFBP5 (SEQ. ID. NO. 64) expression has been reported in RMS, and only ITGA7 (SEQ. ID. NO. 68) and IGFBP5 (SEQ. ID. NO. 64) were found to be expressed in our two normal muscle samples, making the other genes good targets for therapy. Of the genes specifically expressed in a cancer type, 41 have not been previously reported, including 7 ESTs with no current known function (starred * in FIG. 8). All of these warrant further study and may provide new insights into the biology and importantly new targets for the treatment of these cancers. All or a combination of these genes can be used for designing drugs (small molecule screening), or be used in designing vaccines for cancer therapy.

[0197] An ANN method of the invention can also be used to rank genes that are important for each of the four SRBCTs: neuroblastoma (NB), rhabdomyosarcoma (RMS), Burkitt's (BL) and the Ewing family of tumors (EWS). Tables 6 through 9 show weighted gene lists (i.e. the most important genes in order of importance) for NB, RMS, BL, and EWS respectively. The genes in each of these tables are more highly ranked and are highly expressed in each of the individual cancers.

TABLE 6
Ranked genes for Neuroblastoma (NB)

| Rank | Clone Id | GeneDescription | Unigene | Weight | SEQ. ID. NO. |
|---|---|---|---|---|---|
| 2 | 812105 | “ALL1-fused gene from chromosome 1q” | Hs.75823 | 0.96 +− 0.03 | SEQ. ID. NO. 32 |
| 6 | 325182 | “cadherin 2, N-cadherin (neuronal)” | Hs.161 | 0.84 +− 0.03 | SEQ. ID. NO. 31 |
| 8 | 629896 | “microtubule-associated protein 1B” | Hs.103042 | 0.82 +− 0.03 | SEQ. ID. NO. 37 |
| 10 | 878280 | “collapsin response mediator protein 1” | Hs.155392 | 0.80 +− 0.03 | SEQ. ID. NO. 33 |
| 11 | 308231 | “Homo sapiens cDNA FLJ20153 fis, clone | Hs.109805 | 0.78 +− 0.03 | SEQ. ID. NO. 39 |
| | | COL08656, highly similar to AJ001381 | | | |
| | | Homo sapiens incomplete cDNA for a | | | |
| | | mutated allele” | | | |
| 13 | 295985 | “Homo sapiens cDNA FLJ20653 fis, clone | Hs.180059 | 0.75 +− 0.03 | SEQ. ID. NO. 26 |
| | | KAT01739” | | | |
| 14 | 44563 | “growth associated protein 43” | Hs.79000 | 0.75 +− 0.02 | SEQ. ID. NO. 35 |
| 19 | 135688 | “GATA-binding protein 2” | Hs.760 | 0.68 +− 0.02 | SEQ. ID. NO. 44 |
| 21 | 383188 | “recoverin” | Hs.80539 | 0.64 +− 0.02 | SEQ. ID. NO. 38 |
| 23 | 395708 | “dihydropyrimidinase-like 4” | Hs.100058 | 0.63 +− 0.02 | SEQ. ID. NO. 30 |
| 25 | 82225 | “secreted frizzled-related protein 1” | Hs.7306 | 0.62 +− 0.02 | SEQ. ID. NO. 42 |
| 26 | 486787 | “calponin 3, acidic” | Hs.194662 | 0.62 +− 0.02 | SEQ. ID. NO. 43 |
| 28 | 377048 | “Homo sapiens cDNA FLJ20153 fis, clone | Hs.109805 | 0.62 +− 0.02 | SEQ. ID. NO. 40 |
| | | COL08656, highly similar to AJ001381 | | | |
| | | Homo sapiens incomplete cDNA for a | | | |
| | | mutated allele” | | | |
| 30 | 486110 | “profilin 2” | Hs.91747 | 0.59 +− 0.02 | SEQ. ID. NO. 45 |
| 32 | 768246 | “glucose-6-phosphate dehydrogenase” | Hs.80206 | 0.58 +− 0.02 | SEQ. ID. NO. 174 |
| 34 | 786084 | “chromobox homolog 1 (Drosophila HP1 | Hs.77254 | 0.57 +− 0.02 | SEQ. ID. NO. 172 |
| | | beta)” | | | |
| 36 | 211758 | “ribosomal protein S23” | Hs.3463 | 0.57 +− 0.02 | SEQ. ID. NO. 101 |
| 40 | 755228 | “dynamin 1” | Hs.166161 | 0.55 +− 0.02 | SEQ. ID. NO. 165 |
| 42 | 220096 | “—” | — | 0.55 +− 0.02 | SEQ. ID. NO. 147 |
| 43 | 823886 | “Smooth muscle myosin heavy chain | Hs.2094 | 0.55 +− 0.02 | SEQ. ID. NO. 125 |
| | | isoform SMemb [human, umbilical cord, | | | |
| | | fetal aorta, mRNA Partial, 971 nt]” | | | |
| 44 | 788472 | “nucleobindin 1” | Hs.172609 | 0.54 +− 0.02 | SEQ. ID. NO. 123 |
| 45 | 878652 | “procollagen C-endopeptidase enhancer” | Hs.202097 | 0.54 +− 0.02 | SEQ. ID. NO. 138 |
| 46 | 234237 | “Pirin” | Hs.279663 | 0.54 +− 0.02 | SEQ. ID. NO. 151 |
| 50 | 450152 | “Meis (mouse) homolog 3” | Hs.117313 | 0.51 +− 0.02 | SEQ. ID. NO. 139 |
| 51 | 743229 | “neurofilament 3 (150 kD medium)” | Hs.71346 | 0.51 +− 0.02 | SEQ. ID. NO. 209 |
| 56 | 134748 | “glycine cleavage system protein H | Hs.77631 | 0.49 +− 0.02 | SEQ. ID. NO. 210 |
| | | (aminomethyl carrier)” | | | |
| 60 | 486175 | “solute carrier family 16 (monocarboxylic | Hs.75231 | 0.48 +− 0.02 | SEQ. ID. NO. 211 |
| | | acid transporters), member 1” | | | |
| 61 | 376516 | “cell division cycle 4-like” | Hs.62354 | 0.48 +− 0.02 | SEQ. ID. NO. 212 |
| 63 | 292522 | “ESTs” | Hs.38022 | 0.48 +− 0.02 | SEQ. ID. NO. 36 |
| 66 | 843098 | “brain acid-soluble protein 1” | Hs.79516 | 0.48 +− 0.02 | SEQ. ID. NO. 213 |
| 68 | 448386 | “pre-B-cell leukemia transcription factor 3” | Hs.171680 | 0.47 +− 0.02 | SEQ. ID. NO. 214 |
| 70 | 756401 | “Ras homolog enriched in brain 2” | Hs.279903 | 0.47 +− 0.02 | SEQ. ID. NO. 215 |
| 74 | 842918 | “FERM, RhoGEF (ARHGEF) and | Hs.183738 | 0.46 +− 0.02 | SEQ. ID. NO. 122 |
| | | pleckstrin domain protein 1 (chondrocyte- | | | |
| | | derived)” | | | |
| 76 | 784593 | “ESTs” | Hs.6838 | 0.46 +− 0.02 | SEQ. ID. NO. 41 |
| 84 | 364510 | “special AT-rich sequence binding protein | Hs.74592 | 0.44 +− 0.01 | SEQ. ID. NO. 216 |
| | | 1 (binds to nuclear matrix/scaffold- | | | |
| | | associating DNA's)” | | | |
| 88 | 810864 | “CGI-48 protein” | Hs.6153 | 0.43 +− 0.01 | SEQ. ID. NO. 217 |
| 90 | 66977 | “androgen induced protein” | Hs.107528 | 0.43 +− 0.01 | SEQ. ID. NO. 218 |
| 92 | 151261 | “ESTs” | Hs.237971 | 0.43 +− 0.01 | SEQ. ID. NO. 160 |
| 95 | 289645 | “amyloid beta (A4) precursor-like protein | Hs.74565 | 0.43 +− 0.01 | SEQ. ID. NO. 4 |
| | | 1” | | | |
| 96 | 416959 | “nuclear factor I/B” | Hs.33287 | 0.43 +− 0.01 | SEQ. ID. NO. 29 |
| 98 | 47110 | “heterogeneous nuclear ribonucleoprotein | Hs.79625 | 0.43 +− 0.01 | SEQ. ID. NO. 219 |
| | | D” | | | |
| 101 | 244637 | “chromosome 15 open reading frame 3” | Hs.75847 | 0.42 +− 0.01 | SEQ. ID. NO. 220 |
| 102 | 949934 | “heterogeneous nuclear ribonucleoprotein | Hs.77492 | 0.42 +− 0.01 | SEQ. ID. NO. 221 |
| | | A0” | | | |
| 103 | 544664 | “matrin 3” | Hs.78825 | 0.42 +− 0.01 | SEQ. ID. NO. 222 |
| 108 | 782811 | “high-mobility group (nonhistone | Hs.139800 | 0.42 +− 0.01 | SEQ. ID. NO. 129 |
| | | chromosomal) protein isoforms I and Y” | | | |
| 109 | 812967 | “tetraspan 5” | Hs.20709 | 0.41 +− 0.01 | SEQ. ID. NO. 223 |
| 114 | 75254 | “cysteine and glycine-rich protein 2 (LIM | Hs.10526 | 0.41 +− 0.01 | SEQ. ID. NO. 106 |
| | | domain only, smooth muscle)” | | | |
| 115 | 235102 | “ESTs, Moderately similar to LAK-1 | Hs.39488 | 0.41 +− 0.01 | SEQ. ID. NO. 224 |
| | | [H. sapiens]” | | | |
| 118 | 81518 | “apelin; peptide ligand for APJ receptor” | Hs.181060 | 0.41 +− 0.01 | SEQ. ID. NO. 225 |
| 119 | 344243 | “uridine monophosphate kinase” | Hs.75939 | 0.41 +− 0.01 | SEQ. ID. NO. 226 |
| 120 | 789376 | “thioredoxin reductase 1” | Hs.13046 | 0.41 +− 0.01 | SEQ. ID. NO. 227 |
| 122 | 811956 | “RAN, member RAS oncogene family” | Hs.10842 | 0.40 +− 0.01 | SEQ. ID. NO. 228 |
| 124 | 811095 | “Homo sapiens mRNA for KIAA1291 | Hs.9805 | 0.40 +− 0.01 | SEQ. ID. NO. 229 |
| | | protein, partial cds” | | | |
| 125 | 823598 | “proteasome (prosome, macropain) 26S | Hs.4295 | 0.40 +− 0.01 | SEQ. ID. NO. 230 |
| | | subunit, non-ATPase, 12” | | | |
| 130 | 896949 | “3-hydroxy-3-methylglutaryl-Coenzyme A | Hs.11899 | 0.40 +− 0.01 | SEQ. ID. NO. 231 |
| | | reductase” | | | |
| 132 | 140806 | “peptidylglycine alpha-amidating | Hs.83920 | 0.40 +− 0.01 | SEQ. ID. NO. 116 |
| | | monooxygenase” | | | |
| 133 | 760299 | “Dickkopf gene 3” | Hs.4909 | 0.40 +− 0.01 | SEQ. ID. NO. 187 |
| 135 | 22260 | “cytochrome c-1” | Hs.697 | 0.40 +− 0.01 | SEQ. ID. NO. 232 |
| 137 | 294496 | “ESTs” | Hs.23037 | 0.39 +− 0.01 | SEQ. ID. NO. 117 |
| 138 | 813266 | “four and a half LIM domains 1” | Hs.239069 | 0.39 +− 0.01 | SEQ. ID. NO. 47 |
| 139 | 234150 | “myotubularin related protein 4” | Hs.141727 | 0.39 +− 0.01 | SEQ. ID. NO. 233 |
| 140 | 246194 | “ESTs” | Hs.125522 | 0.39 +− 0.01 | SEQ. ID. NO. 234 |
| 142 | 207358 | “solute carrier family 2 (facilitated glucose | Hs.169902 | 0.39 +− 0.01 | SEQ. ID. NO. 235 |
| | | transporter), member 1” | | | |
| 148 | 1456118 | “proteasome (prosome, macropain) | Hs.9280 | 0.38 +− 0.01 | SEQ. ID. NO. 236 |
| | | subunit, beta type, 9 (large multifunctional | | | |
| | | protease 2)” | | | |
| 149 | 753215 | “guanine nucleotide binding protein (G | Hs.203862 | 0.38 +− 0.01 | SEQ. ID. NO. 237 |
| | | protein), alpha inhibiting activity | | | |
| | | polypeptide 1” | | | |
| 151 | 51041 | “ESTs” | Hs.280770 | 0.38 +− 0.01 | SEQ. ID. NO. 238 |
| 153 | 813499 | “Sjogren's syndrome/scleroderma | Hs.25723 | 0.37 +− 0.01 | SEQ. ID. NO. 239 |
| | | autoantigen 1” | | | |
| 154 | 1142132 | “RaP2 interacting protein 8” | Hs.6755 | 0.37 +− 0.01 | SEQ. ID. NO. 240 |
| 155 | 789182 | “proliferating cell nuclear antigen” | Hs.78996 | 0.37 +− 0.01 | SEQ. ID. NO. 241 |
| 161 | 726236 | “paired mesoderm homeo box 1” | Hs.155606 | 0.37 +− 0.01 | SEQ. ID. NO. 242 |
| 164 | 866694 | “butyrate-induced transcript 1” | Hs.260622 | 0.37 +− 0.01 | SEQ. ID. NO. 243 |
| 165 | 853368 | “thymidylate synthetase” | Hs.82962 | 0.37 +− 0.01 | SEQ. ID. NO. 244 |
| 167 | 85259 | “heme oxygenase (decycling) 1” | Hs.202833 | 0.36 +− 0.01 | SEQ. ID. NO. 245 |
| 168 | 83279 | “translocase of inner mitochondrial | Hs.11866 | 0.36 +− 0.01 | SEQ. ID. NO. 246 |
| | | membrane 23 (yeast) homolog” | | | |
| 169 | 137535 | “transcriptional intermediary factor 1” | Hs.183858 | 0.36 +− 0.01 | SEQ. ID. NO. 247 |
| 170 | 770391 | “polymerase (RNA) II (DNA directed) | Hs.79402 | 0.36 +− 0.01 | SEQ. ID. NO. 248 |
| | | polypeptide C (33 kD)” | | | |
| 174 | 824591 | “heterogeneous nuclear ribonucleoprotein | Hs.808 | 0.36 +− 0.01 | SEQ. ID. NO. 249 |
| | | F” | | | |
| 177 | 783697 | “BCL2/adenovirus E1B 19 kD-interacting | Hs.79428 | 0.36 +− 0.01 | SEQ. ID. NO. 250 |
| | | protein 3” | | | |
| 178 | 144932 | “deleted in oral cancer (mouse, homolog) | Hs.3436 | 0.36 +− 0.01 | SEQ. ID. NO. 128 |
| | | 1” | | | |
| 179 | 795543 | “thioredoxin peroxidase (antioxidant | Hs.83383 | 0.36 +− 0.01 | SEQ. ID. NO. 251 |
| | | enzyme)” | | | |
| 181 | 292996 | “tyrosine 3-monooxygenase/tryptophan 5- | Hs.75544 | 0.36 +− 0.01 | SEQ. ID. NO. 252 |
| | | monooxygenase activation protein, eta | | | |
| | | polypeptide” | | | |
| 182 | 345833 | “heterogeneous nuclear ribonucleoprotein | Hs.81361 | 0.36 +− 0.01 | SEQ. ID. NO. 253 |
| | | A/B” | | | |
| 184 | 810510 | “ESTs” | Hs.14317 | 0.35 +− 0.01 | SEQ. ID. NO. 254 |
| 185 | 882510 | “karyopherin alpha 2 (RAG cohort 1, | Hs.159557 | 0.35 +− 0.01 | SEQ. ID. NO. 255 |
| | | importin alpha 1)” | | | |
| 186 | 144905 | “PRO1912 protein” | Hs.29494 | 0.35 +− 0.01 | SEQ. ID. NO. 256 |
| 188 | 878833 | “ubiquitin carboxyl-terminal esterase L1 | Hs.76118 | 0.35 +− 0.01 | SEQ. ID. NO. 257 |
| | | (ubiquitin thiolesterase)” | | | |
| 189 | 139835 | “UDP-glucose dehydrogenase” | Hs.28309 | 0.35 +− 0.01 | SEQ. ID. NO. 258 |
| 190 | 207082 | “glucosamine-6-phosphate deaminase” | Hs.278500 | 0.35 +− 0.01 | SEQ. ID. NO. 259 |
| 193 | 884718 | “Hairpin binding protein, histone” | Hs.75257 | 0.35 +− 0.01 | SEQ. ID. NO. 260 |
| 195 | 71672 | “electron-transfer-flavoprotein, alpha | Hs.169919 | 0.34 +− 0.01 | SEQ. ID. NO. 261 |
| | | polypeptide (glutaric aciduria II)” | | | |
| 197 | 789204 | “translocation protein 1” | Hs.8146 | 0.34 +− 0.01 | SEQ. ID. NO. 262 |
| 198 | 757404 | “von Hippel-Lindau binding protein 1” | Hs.198307 | 0.34 +− 0.01 | SEQ. ID. NO. 263 |
| 200 | 784257 | “kinesin family member 3C” | Hs.21611 | 0.34 +− 0.01 | SEQ. ID. NO. 34 |

TABLE 7
Ranked Genes for Rhabdomyosarcoma (RMS)

| Rank | Clone Id | GeneDescription | Unigene | Weight | SEQ. ID. NO. |
|---|---|---|---|---|---|
| 1 | 296448 | “insulin-like growth factor 2 | Hs.251664 | 0.95 +− 0.05 | SEQ. ID. NO. 72 |
| | | (somatomedin A)” | | | |
| 2 | 207274 | “insulin-like growth factor 2 | Hs.251664 | 0.90 +− 0.04 | SEQ. ID. NO. 73 |
| | | (somatomedin A)” | | | |
| 3 | 244618 | “ESTs” | Hs.15463 | 0.70 +− 0.03 | SEQ. ID. NO. 77 |
| 4 | 489631 | “chondroitin sulfate proteaglycan 2 | Hs.81800 | 0.54 +− 0.03 | SEQ. ID. NO. 99 |
| | | (versican)” | | | |
| 5 | 298062 | “troponin T2, cardiac” | Hs.89749 | 0.53 +− 0.03 | SEQ. ID. NO. 74 |
| 6 | 784224 | “fibroblast growth factor receptor 4” | Hs.165950 | 0.53 +− 0.03 | SEQ. ID. NO. 71 |
| 7 | 1409509 | “troponin T1, skeletal, slow” | Hs.73980 | 0.52 +− 0.02 | SEQ. ID. NO. 70 |
| 8 | 461425 | “myosin, light polypeptide 4, alkali; | Hs.154156 | 0.50 +− 0.02 | SEQ. ID. NO. 75 |
| | | atrial, embryonic” | | | |
| 9 | 245330 | “insulin-like growth factor 2 | Hs.251664 | 0.47 +− 0.02 | SEQ. ID. NO. 78 |
| | | (somatomedin A)” | | | |
| 10 | 796258 | “sarcoglycan, alpha (50 kD | Hs.99931 | 0.46 +− 0.02 | SEQ. ID. NO. 76 |
| | | dystrophin-associated glycoprotein)” | | | |
| 11 | 293500 | “ESTs” | Hs.49714 | 0.45 +− 0.02 | SEQ. ID. NO. 80 |
| 12 | 122159 | “collagen, type III, alpha 1 (Ehlers- | Hs.119571 | 0.45 +− 0.02 | SEQ. ID. NO. 66 |
| | | Danlos syndrome type IV, autosomal | | | |
| | | dominant)” | | | |
| 13 | 324494 | “heat shock 27 kD protein 2” | Hs.78846 | 0.44 +− 0.02 | SEQ. ID. NO. 62 |
| 14 | 898219 | “mesoderm specific transcript | Hs.79284 | 0.44 +− 0.02 | SEQ. ID. NO. 113 |
| | | (mouse) homolog” | | | |
| 15 | 714453 | “interleukin 4 receptor” | Hs.75545 | 0.44 +− 0.02 | SEQ. ID. NO. 83 |
| 16 | 42558 | “glycine amidinotransferase (L- | Hs.75335 | 0.44 +− 0.02 | SEQ. ID. NO. 79 |
| | | arginine:glycine amidinotransferase)” | | | |
| 17 | 377468 | “sprouty (Drosophila) homolog 1 | Hs.88044 | 0.43 +− 0.02 | SEQ. ID. NO. 107 |
| | | (antagonist of FGF signaling)” | | | |
| 18 | 769716 | “neurofibromin 2 (bilateral acoustic | Hs.902 | 0.42 +− 0.02 | SEQ. ID. NO. 104 |
| | | neuroma)” | | | |
| 19 | 809901 | “collagen, type XV, alpha 1” | Hs.83164 | 0.42 +− 0.02 | SEQ. ID. NO. 67 |
| 20 | 813841 | “plasminogen activator, tissue” | Hs.274404 | 0.41 +− 0.02 | SEQ. ID. NO. 132 |
| 21 | 795877 | “serum-inducible kinase” | Hs.3838 | 0.41 +− 0.02 | SEQ. ID. NO. 102 |
| 22 | 214572 | “ESTs” | Hs.280460 | 0.40 +− 0.02 | SEQ. ID. NO. 135 |
| 23 | 130057 | “ESTs” | Hs.23057 | 0.39 +− 0.02 | SEQ. ID. NO. 109 |
| 24 | 767495 | “GLI-Kruppel family member GLI3 | Hs.72916 | 0.39 +− 0.02 | SEQ. ID. NO. 103 |
| | | (Greig cephalopolysyndactyly | | | |
| | | syndrome)” | | | |
| 25 | 246035 | “ESTs” | Hs.78026 | 0.39 +− 0.02 | SEQ. ID. NO. 119 |
| 26 | 41591 | “meningioma (disrupted in balanced | Hs.268515 | 0.38 +− 0.02 | SEQ. ID. NO. 60 |
| | | translocation) 1” | | | |
| 27 | 714106 | “plasminogen activator, urokinase” | Hs.77274 | 0.38 +− 0.02 | SEQ. ID. NO. 121 |
| 28 | 770059 | “heparan sulfate proteoglycan 2 | Hs.211573 | 0.38 +− 0.02 | SEQ. ID. NO. 110 |
| | | (perlecan)” | | | |
| 29 | 814798 | “aldehyde dehydrogenase 6” | Hs.75746 | 0.37 +− 0.02 | SEQ. ID. NO. 196 |
| 30 | 365515 | “fibroblast growth factor 7 | Hs.164568 | 0.37 +− 0.02 | SEQ. ID. NO. 111 |
| | | (keratinocyte growth factor)” | | | |
| 31 | 788107 | “bridging integrator 1” | Hs.193163 | 0.36 +− 0.02 | SEQ. ID. NO. 52 |
| 32 | 250654 | “secreted protein, acidic, cysteine- | Hs.111779 | 0.36 +− 0.02 | SEQ. ID. NO. 149 |
| | | rich (osteonectin)” | | | |
| 33 | 295985 | “Homo sapiens cDNA FLJ20653 fis, | Hs.180059 | 0.36 +− 0.02 | SEQ. ID. NO. 26 |
| | | clone KAT01739” | | | |
| 34 | 789253 | “presenilin 2 (Alzheimer disease 4)” | Hs.25363 | 0.36 +− 0.02 | SEQ. ID. NO. 143 |
| 35 | 299737 | “Homo sapiens clone 24411 mRNA | Hs.20952 | 0.35 +− 0.02 | SEQ. ID. NO. 157 |
| | | sequence” | | | |
| 36 | 859359 | “quinone oxidoreductase homolog” | Hs.50649 | 0.35 +− 0.02 | SEQ. ID. NO. 50 |
| 37 | 66714 | “peanut (Drosophila)-like 2” | Hs.155524 | 0.34 +− 0.02 | SEQ. ID. NO. 182 |
| 39 | 755750 | “non-metastatic cells 2, protein | Hs.275163 | 0.34 +− 0.02 | SEQ. ID. NO. 49 |
| | | (NM23B) expressed in” | | | |
| 40 | 727251 | “CD9 antigen (p24)” | Hs.1244 | 0.33 +− 0.02 | SEQ. ID. NO. 189 |
| 41 | 25725 | “farnesyl-diphosphate | Hs.48876 | 0.33 +− 0.02 | SEQ. ID. NO. 264 |
| | | farnesyltransferase 1” | | | |
| 42 | 143306 | “lymphocyte-specific protein 1” | Hs.56729 | 0.33 +− 0.02 | SEQ. ID. NO. 205 |
| 45 | 491692 | “collagen, type IV, alpha 1” | Hs.119129 | 0.32 +− 0.02 | SEQ. ID. NO. 133 |
| 46 | 142134 | “hypothetical protein FLJ20185” | Hs.272972 | 0.32 +− 0.02 | SEQ. ID. NO. 134 |
| 47 | 813823 | “lumican” | Hs.79914 | 0.32 +− 0.02 | SEQ. ID. NO. 265 |
| 48 | 788695 | “troponin T3, skeletal, fast” | Hs.73454 | 0.32 +− 0.02 | SEQ. ID. NO. 197 |
| 49 | 308163 | “ESTs” | Hs.84520 | 0.32 +− 0.02 | SEQ. ID. NO. 57 |
| 50 | 377671 | “integrin, alpha 7” | Hs.74369 | 0.31 +− 0.02 | SEQ. ID. NO. 68 |
| 51 | 281901 | “ESTs” | Hs.74280 | 0.31 +− 0.02 | SEQ. ID. NO. 266 |
| 52 | 796904 | “pleomorphic adenoma gene-like 1” | Hs.75825 | 0.31 +− 0.01 | SEQ. ID. NO. 120 |
| 53 | 773215 | “runt-related transcription factor 1 | Hs.129914 | 0.30 +− 0.01 | SEQ. ID. NO. 142 |
| | | (acute myeloid leukemia 1; aml1 | | | |
| | | oncogene)” | | | |
| 55 | 486787 | “calponin 3, acidic” | Hs.194662 | 0.30 +− 0.01 | SEQ. ID. NO. 43 |
| 56 | 341588 | “CGI-119 protein” | Hs.25615 | 0.29 +− 0.01 | SEQ. ID. NO. 131 |
| 57 | 839552 | “nuclear receptor coactivator 1” | Hs.74002 | 0.29 +− 0.01 | SEQ. ID. NO. 267 |
| 58 | 365826 | “growth arrest-specific 1” | Hs.65029 | 0.29 +− 0.01 | SEQ. ID. NO. 59 |
| 59 | 111884 | “ESTs, Weakly similar to hTcf-4 | Hs.102367 | 0.29 +− 0.01 | SEQ. ID. NO. 268 |
| | | [H. sapiens]” | | | |
| 60 | 797048 | “bone morphogenetic protein 4” | Hs.68879 | 0.28 +− 0.01 | SEQ. ID. NO. 269 |
| 61 | 769959 | “collagen, type IV, alpha 2” | Hs.75617 | 0.28 +− 0.01 | SEQ. ID. NO. 69 |
| 62 | 204545 | “ESTs” | Hs.8966 | 0.28 +− 0.01 | SEQ. ID. NO. 58 |
| 63 | 771323 | “procollagen-lysine, 2-oxoglutarate 5- | Hs.75093 | 0.27 +− 0.01 | SEQ. ID. NO. 270 |
| | | dioxygenase (lysine hydroxylase, | | | |
| | | Ehlers-Danlos syndrome type VI)” | | | |
| 65 | 897865 | “midline 1 (Opitz/BBB syndrome)” | Hs.27695 | 0.27 +− 0.01 | SEQ. ID. NO. 271 |
| 66 | 298417 | “trefoil factor 3 (intestinal)” | Hs.82961 | 0.27 +− 0.01 | SEQ. ID. NO. 272 |
| 67 | 79022 | “FBJ murine osteosarcoma viral | Hs.75678 | 0.27 +− 0.01 | SEQ. ID. NO. 273 |
| | | oncogene homolog B” | | | |
| 68 | 290378 | “podocalyxin-like” | Hs.16426 | 0.27 +− 0.01 | SEQ. ID. NO. 274 |
| 69 | 784593 | “ESTs” | Hs.6838 | 0.27 +− 0.01 | SEQ. ID. NO. 41 |
| 70 | 32493 | “integrin, alpha 6” | Hs.227730 | 0.27 +− 0.01 | SEQ. ID. NO. 275 |
| 71 | 45542 | “Human insulin-like growth factor | Hs.103391 | 0.26 +− 0.01 | SEQ. ID. NO. 64 |
| | | binding protein 5 (IGFBP5) mRNA” | | | |
| 72 | 208001 | “CD59 antigen p18-20 (antigen | Hs.119663 | 0.26 +− 0.01 | SEQ. ID. NO. 276 |
| | | identified by monoclonal antibodies | | | |
| | | 16.3A5, EJ16, EJ30, EL32 and | | | |
| | | G344)” | | | |
| 73 | 413633 | “EST” | — | 0.26 +− 0.01 | SEQ. ID. NO. 115 |
| 74 | 284882 | “collagen, type II, alpha 1 (primary | Hs.81343 | 0.26 +− 0.01 | SEQ. ID. NO. 277 |
| | | osteoarthritis, spondyloepiphyseal | | | |
| | | dysplasia, congenital)” | | | |
| 75 | 273435 | “v-yes-1 Yamaguchi sarcoma viral | Hs.194148 | 0.26 +− 0.01 | SEQ. ID. NO. 184 |
| | | oncogene homolog 1” | | | |
| 76 | 839991 | “collagen, type I, alpha 2” | Hs.179573 | 0.26 +− 0.01 | SEQ. ID. NO. 278 |
| 78 | 323371 | “amyloid beta (A4) precursor protein | Hs.177486 | 0.26 +− 0.01 | SEQ. ID. NO. 27 |
| | | (protease nexin-II, Alzheimer | | | |
| | | disease)” | | | |
| 79 | 362483 | “spectrin, beta, non-erythrocylic 1” | Hs.107164 | 0.26 +− 0.01 | SEQ. ID. NO. 170 |
| 80 | 839736 | “crystallin, alpha B” | Hs.1940 | 0.25 +− 0.01 | SEQ. ID. NO. 61 |
| 81 | 380620 | “presenilin 2 (Alzheimer disease 4)” | Hs.25363 | 0.25 +− 0.01 | SEQ. ID. NO. 279 |
| 82 | 343867 | “allograft inflammatory factor 1” | Hs.76364 | 0.25 +− 0.01 | SEQ. ID. NO. 150 |
| 83 | 882506 | “lysyl oxidase-like 2” | Hs.83354 | 0.25 +− 0.01 | SEQ. ID. NO. 207 |
| 84 | 214990 | “gelsolin (amyloidosis, Finnish type)” | Hs.80562 | 0.25 +− 0.01 | SEQ. ID. NO. 127 |
| 85 | 878182 | “alpha-2-macroglobulin” | Hs.74561 | 0.25 +− 0.01 | SEQ. ID. NO. 136 |
| 86 | 301122 | “extracellular matrix protein 1” | Hs.81071 | 0.25 +− 0.01 | SEQ. ID. NO. 195 |
| 87 | 198982 | “DNA (cytosine-5-)- | Hs.97681 | 0.25 +− 0.01 | SEQ. ID. NO. 280 |
| | | methyltransferase 2” | | | |
| 88 | 138672 | “ESTs” | Hs.28412 | 0.25 +− 0.01 | SEQ. ID. NO. 281 |
| 89 | 246377 | “EST” | Hs.102670 | 0.24 +− 0.01 | SEQ. ID. NO. 51 |
| 90 | 50941 | “cadherin 13, H-cadherin (heart)” | Hs.63984 | 0.24 +− 0.01 | SEQ. ID. NO. 282 |
| 91 | 812196 | “UDP-glucose ceramide | Hs.152601 | 0.24 +− 0.01 | SEQ. ID. NO. 283 |
| | | glucosyltransferase” | | | |
| 92 | 120881 | “proteasome (prosome, macropain) | Hs.251531 | 0.24 +− 0.01 | SEQ. ID. NO. 284 |
| | | subunit, alpha type, 4” | | | |
| 93 | 813698 | “sprouty (Drosophila) homolog 2” | Hs.18676 | 0.24 +− 0.01 | SEQ. ID. NO. 130 |
| 94 | 810612 | “S100 calcium-binding protein A11 | Hs.256290 | 0.24 +− 0.01 | SEQ. ID. NO. 285 |
| | | (calgizzarin)” | | | |
| 97 | 767851 | “fibrillin 1 (Marfan syndrome)” | Hs.750 | 0.23 +− 0.01 | SEQ. ID. NO. 286 |
| 99 | 211758 | “ribosomal protein S23” | Hs.3463 | 0.23 +− 0.01 | SEQ. ID. NO. 101 |
| 100 | 506369 | “nidogen (enactin)” | Hs.62041 | 0.23 +− 0.01 | SEQ. ID. NO. 287 |
| 101 | 75254 | “cysteine and glycine-rich protein 2 | Hs.10526 | 0.23 +− 0.01 | SEQ. ID. NO. 106 |
| | | (LIM domain only, smooth muscle)” | | | |
| 103 | 823851 | “AE-binding protein 1” | Hs.118397 | 0.23 +− 0.01 | SEQ. ID. NO. 288 |
| 104 | 52096 | “platelet-derived growth factor | Hs.74615 | 0.23 +− 0.01 | SEQ. ID. NO. 124 |
| | | receptor, alpha polypeptide” | | | |
| 106 | 760224 | “X-ray repair complementing | Hs.98493 | 0.23 +− 0.01 | SEQ. ID. NO. 289 |
| | | defective repair in Chinese hamster | | | |
| | | cells 1” | | | |
| 107 | 725473 | “DNA segment on chromosome 12 | Hs.74085 | 0.23 +− 0.01 | SEQ. ID. NO. 290 |
| | | (unique) 2489 expressed sequence” | | | |
| 111 | 148028 | “epidermal growth factor receptor | Hs.2132 | 0.23 +− 0.01 | SEQ. ID. NO. 291 |
| | | pathway substrate 8” | | | |
| 113 | 769028 | “mesenchyme homeo box 1” | Hs.438 | 0.23 +− 0.01 | SEQ. ID. NO. 198 |
| 115 | 39093 | “methionine aminopeptidase; eIF-2- | Hs.78935 | 0.22 +− 0.01 | SEQ. ID. NO. 63 |
| | | associated p67” | | | |
| 116 | 854899 | “dual specificity phosphatase 6” | Hs.180383 | 0.22 +− 0.01 | SEQ. ID. NO. 48 |
| 118 | 547247 | “stanniocalcin” | Hs.25590 | 0.22 +− 0.01 | SEQ. ID. NO. 292 |
| 119 | 26418 | “endothelial differentiation, | Hs.154210 | 0.22 +− 0.01 | SEQ. ID. NO. 293 |
| | | sphingolipid G-protein-coupled | | | |
| | | receptor, 1” | | | |
| 120 | 811848 | “transforming growth factor beta 1 | Hs.25511 | 0.22 +− 0.01 | SEQ. ID. NO. 294 |
| | | induced transcript 1” | | | |
| 123 | 178463 | “transcription factor 8 (represses | Hs.232068 | 0.22 +− 0.01 | SEQ. ID. NO. 295 |
| | | interleukin 2 expression)” | | | |
| 124 | 810859 | “natural killer cell transcript 4” | Hs.943 | 0.22 +− 0.01 | SEQ. ID. NO. 296 |
| 125 | 40643 | “platelet-derived growth factor | Hs.76144 | 0.22 +− 0.01 | SEQ. ID. NO. 297 |
| | | receptor, beta polypeptide” | | | |
| 126 | 782193 | “thioredoxin” | Hs.76136 | 0.22 +− 0.01 | SEQ. ID. NO. 126 |
| 127 | 1412412 | “elastase 1, pancreatic” | Hs.21 | 0.22 +− 0.01 | SEQ. ID. NO. 298 |
| 128 | 470128 | “myosin IC” | Hs.82251 | 0.22 +− 0.01 | SEQ. ID. NO. 299 |
| 129 | 68950 | “cyclin E1” | Hs.9700 | 0.22 +− 0.01 | SEQ. ID. NO. 300 |
| 130 | 66552 | “ESTs” | Hs.119021 | 0.22 +− 0.01 | SEQ. ID. NO. 301 |
| 131 | 233721 | “insulin-like growth factor binding | Hs.162 | 0.22 +− 0.01 | SEQ. ID. NO. 28 |
| | | protein 2 (36 kD)” | | | |
| 133 | 814444 | “cofactor required for Sp1 | Hs.279902 | 0.21 +− 0.01 | SEQ. ID. NO. 302 |
| | | transcriptional activation, subunit 9 | | | |
| | | (33 kD)” | | | |
| 134 | 160723 | “laminin, gamma 1 (formerly | Hs.214982 | 0.21 +− 0.01 | SEQ. ID. NO. 303 |
| | | LAMB2)” | | | |
| 135 | 752652 | “transcription factor 7-like 2 (T-cell | Hs.154485 | 0.21 +− 0.01 | SEQ. ID. NO. 203 |
| | | specific, HMG-box)” | | | |
| 136 | 180902 | “CGI-43 protein” | Hs.111515 | 0.21 +− 0.01 | SEQ. ID. NO. 304 |
| 137 | 154472 | “fibroblast growth factor receptor 1 | Hs.748 | 0.21 +− 0.01 | SEQ. ID. NO. 305 |
| | | (fms-related tyrosine kinase 2, Pfeiffer | | | |
| | | syndrome)” | | | |
| 139 | 82225 | “secreted frizzled-related protein 1” | Hs.7306 | 0.21 +− 0.01 | SEQ. ID. NO. 42 |
| 140 | 898092 | “connective tissue growth factor” | Hs.75511 | 0.21 +− 0.01 | SEQ. ID. NO. 306 |
| 142 | 773568 | “POU domain, class 4, transcription | Hs.211588 | 0.21 +− 0.01 | SEQ. ID. NO. 307 |
| | | factor 1” | | | |
| 143 | 144797 | “a disintegrin-like and | Hs.8230 | 0.21 +− 0.01 | SEQ. ID. NO. 308 |
| | | metalloprotease (reprolysin type) with | | | |
| | | thrombospondin type 1 motif, 1” | | | |
| 145 | 139818 | “KIAA0669 gene product” | Hs.52526 | 0.21 +− 0.01 | SEQ. ID. NO. 309 |
| 146 | 358433 | “retinoid X receptor, gamma” | Hs.26550 | 0.21 +− 0.01 | SEQ. ID. NO. 167 |
| 147 | 141192 | “Leman coiled-coil protein” | Hs.92186 | 0.21 +− 0.01 | SEQ. ID. NO. 310 |
| 148 | 813707 | “regulator of G-protein signalling 16” | Hs.183601 | 0.21 +− 0.01 | SEQ. ID. NO. 311 |
| 149 | 781014 | “suppression of tumorigenicity 5” | Hs.79265 | 0.21 +− 0.01 | SEQ. ID. NO. 312 |
| 150 | 857640 | “Human alpha-2 collagen type VI | Hs.281620 | 0.21 +− 0.01 | SEQ. ID. NO. 313 |
| | | mRNA, 3′ end” | | | |
| 151 | 811028 | “cathepsin D (lysosomal aspartyl | Hs.79572 | 0.21 +− 0.01 | SEQ. ID. NO. 199 |
| | | protease)” | | | |
| 153 | 196992 | “aldo-keto reductase family 1, | Hs.275374 | 0.20 +− 0.01 | SEQ. ID. NO. 200 |
| | | member C1 (dihydrodiol | | | |
| | | dehydrogenase 1; 20-alpha (3-alpha)- | | | |
| | | hydroxysteroid dehydrogenase)” | | | |
| 154 | 781019 | “paraoxonase 2” | Hs.169857 | 0.20 +− 0.01 | SEQ. ID. NO. 314 |
| 155 | 491559 | “fatty acid binding protein 3, muscle | Hs.49881 | 0.20 +− 0.01 | SEQ. ID. NO. 315 |
| | | and heart (mammary-derived growth | | | |
| | | inhibitor)” | | | |
| 156 | 358531 | “v-jun avian sarcoma virus 17 | Hs.78465 | 0.20 +− 0.01 | SEQ. ID. NO. 316 |
| | | oncogene homolog” | | | |
| 157 | 127099 | “Homo sapiens cDNA FLJ20754 fis, | Hs.72249 | 0.20 +− 0.01 | SEQ. ID. NO. 317 |
| | | clone HEP02246” | | | |
| 158 | 263716 | “collagen, type VI, alpha 1” | Hs.108885 | 0.20 +− 0.01 | SEQ. ID. NO. 318 |
| 162 | 787861 | “dual-specificity tyrosine-(Y)- | Hs.173135 | 0.20 +− 0.01 | SEQ. ID. NO. 319 |
| | | phosphorylation regulated kinase 2” | | | |
| 163 | 246722 | “trinucleotide repeat containing 3” | Hs.21858 | 0.20 +− 0.01 | SEQ. ID. NO. 320 |
| 164 | 151449 | “protein tyrosine phosphatase, non- | Hs.155693 | 0.20 +− 0.01 | SEQ. ID. NO. 321 |
| | | receptor type 21” | | | |
| 165 | 81475 | “—” | — | 0.20 +− 0.01 | SEQ. ID. NO. 322 |
| 166 | 810512 | “thrombospondin 1” | Hs.87409 | 0.20 +− 0.01 | SEQ. ID. NO. 323 |
| 168 | 233071 | “transmembrane protein 2” | Hs.160417 | 0.19 +− 0.01 | SEQ. ID. NO. 324 |
| 170 | 809910 | “interferon induced transmembrane | Hs.182241 | 0.19 +− 0.01 | SEQ. ID. NO. 55 |
| | | protein 3 (1-8U)” | | | |
| 171 | 233688 | “a disintegrin and metalloproteinase | Hs.8850 | 0.19 +− 0.01 | SEQ. ID. NO. 325 |
| | | domain 12 (meltrin alpha)” | | | |
| 172 | 128054 | “H2A histone family, member X” | Hs.147097 | 0.19 +− 0.01 | SEQ. ID. NO. 326 |
| 173 | 143523 | “collagen, type V, alpha 1” | Hs.146428 | 0.19 +− 0.01 | SEQ. ID. NO. 327 |
| 174 | 809719 | “protein tyrosine phosphatase, | Hs.170121 | 0.19 +− 0.01 | SEQ. ID. NO. 328 |
| | | receptor type, c polypeptide” | | | |
| 175 | 45291 | “dentatorubral-pallidoluysian atrophy | Hs.169488 | 0.19 +− 0.01 | SEQ. ID. NO. 54 |
| | | (atrophin-1)” | | | |
| 176 | 758266 | “thrombospondin 4” | Hs.75774 | 0.19 +− 0.01 | SEQ. ID. NO. 329 |
| 178 | 247818 | “ESTs” | Hs.239666 | 0.19 +− 0.01 | SEQ. ID. NO. 330 |
| 179 | 130824 | “S-phase kinase-associated protein 2 | Hs.23348 | 0.19 +− 0.01 | SEQ. ID. NO. 331 |
| | | (p45)” | | | |
| 180 | 341328 | “tropomyosin 1 (alpha)” | Hs.77899 | 0.19 +− 0.01 | SEQ. ID. NO. 332 |
| 181 | 123916 | “dystrophia myotonica-containing | Hs.275924 | 0.19 +− 0.01 | SEQ. ID. NO. 333 |
| | | WD repeat motif” | | | |
| 183 | 682555 | “insulin-like growth factor 1 receptor” | Hs.239176 | 0.19 +− 0.01 | SEQ. ID. NO. 334 |
| 184 | 868380 | “Fc fragment of IgG, low affinity IIa, | Hs.78864 | 0.19 +− 0.01 | SEQ. ID. NO. 335 |
| | | receptor for (CD32)” | | | |
| 187 | 869187 | “Homo sapiens clone 23698 mRNA | Hs.8136 | 0.19 +− 0.01 | SEQ. ID. NO. 336 |
| | | sequence” | | | |
| 190 | 207920 | “solute carrier family 17 (sodium | Hs.19710 | 0.19 +− 0.01 | SEQ. ID. NO. 337 |
| | | phosphate), member 2” | | | |
| 192 | 469345 | “kinase insert domain receptor (a type | Hs.12337 | 0.18 +− 0.01 | SEQ. ID. NO. 338 |
| | | III receptor tyrosine kinase)” | | | |
| 193 | 754406 | “integrin, alpha M (complement | Hs.172631 | 0.18 +− 0.01 | SEQ. ID. NO. 339 |
| | | component receptor 3, alpha; also | | | |
| | | known as CD11b (p170), macrophage | | | |
| | | antigen alpha polypeptide)” | | | |
| 196 | 43563 | “cytochrome P450, subfamily | Hs.82568 | 0.18 +− 0.01 | SEQ. ID. NO. 340 |
| | | XXVIIA (steroid 27-hydroxylase, | | | |
| | | cerebrotendinous xanthomatosis), | | | |
| | | polypeptide 1” | | | |
| 198 | 753775 | “guanosine monophosphate | Hs.1435 | 0.18 +− 0.01 | SEQ. ID. NO. 341 |
| | | reductase” | | | |

TABLE 8
Ranked genes for Burkitt's (BL)

| Rank | Clone Id | GeneDescription | Unigene | Weight | SEQ. ID. NO. |
|---|---|---|---|---|---|
| 2 | 80109 | “major histocompatibility complex, | Hs.198253 | 0.58 +− 0.02 | SEQ. ID. NO. 88 |
| | | class II, DQ alpha 1” | | | |
| 3 | 840942 | “major histocompatibility complex, | Hs.814 | 0.56 +− 0.02 | SEQ. ID. NO. 87 |
| | | class II, DP beta 1” | | | |
| 7 | 183337 | “major histocompatibility complex, | Hs.77522 | 0.52 +− 0.02 | SEQ. ID. NO. 89 |
| | | class II, DM alpha” | | | |
| 17 | 609663 | “protein kinase, cAMP-dependent, | Hs.77439 | 0.45 +− 0.02 | SEQ. ID. NO. 95 |
| | | regulatory, type II, beta” | | | |
| 23 | 767183 | “hematopoietic cell-specific Lyn | Hs.14601 | 0.43 +− 0.02 | SEQ. ID. NO. 91 |
| | | substrate 1” | | | |
| 27 | 297392 | “metallothionein 1L” | Hs.94360 | 0.42 +− 0.02 | SEQ. ID. NO. 93 |
| 30 | 200814 | “membrane metallo-endopeptidase | Hs.1298 | 0.41 +− 0.02 | SEQ. ID. NO. 94 |
| | | (neutral endopeptidase, | | | |
| | | enkephalinase, CALLA, CD10)” | | | |
| 33 | 241412 | “E74-like factor 1 (ets domain | Hs.154365 | 0.41 +− 0.02 | SEQ. ID. NO. 90 |
| | | transcription factor)” | | | |
| 35 | 1469292 | “pim-2 oncogene” | Hs.80205 | 0.39 +− 0.02 | SEQ. ID. NO. 92 |
| 45 | 417226 | “v-myc avian myelocytomatosis | Hs.79070 | 0.38 +− 0.01 | SEQ. ID. NO. 81 |
| | | viral oncogene homolog” | | | |
| 57 | 47475 | “p53 inducible protein” | Hs.258503 | 0.36 +− 0.01 | 186 |
| 61 | 236282 | “Wiskott-Aldrich syndrome | Hs.2157 | 0.35 +− 0.01 | SEQ. ID. NO. 164 |
| | | (ecezema-thrombocytopenia)” | | | |
| 63 | 868304 | “actin, alpha 2, smooth muscle, | Hs.195851 | 0.34 +− 0.01 | SEQ. ID. NO. 86 |
| | | aorta” | | | |
| 65 | 740604 | “interferon stimulated gene (20 kD)” | Hs.183487 | 0.34 +− 0.01 | SEQ. ID. NO. 342 |
| 82 | 824602 | “interferon, gamma-inducible | Hs.155530 | 0.31 +− 0.01 | SEQ. ID. NO. 84 |
| | | protein 16” | | | |
| 83 | 624360 | “proteasome (prosome, macropain) | Hs.180062 | 0.31 +− 0.01 | SEQ. ID. NO. 162 |
| | | subunit, beta type, 8 (large | | | |
| | | multifunctional protease 7)” | | | |
| 84 | 344134 | “immunoglobulin lambda-like | Hs.170116 | 0.31 +− 0.01 | SEQ. ID. NO. 185 |
| | | polypeptide 3” | | | |
| 85 | 193913 | “v-yes-1 Yamaguchi sarcoma viral | Hs.80887 | 0.31 +− 0.01 | SEQ. ID. NO. 343 |
| | | related oncogene homolog” | | | |
| 88 | 814526 | “seb4D” | Hs.236361 | 0.31 +− 0.01 | SEQ. ID. NO. 96 |
| 101 | 236034 | “uncoupling protein 2 | Hs.80658 | 0.30 +− 0.01 | SEQ. ID. NO. 344 |
| | | (mitochondrial, proton carrier)” | | | |
| 106 | 745343 | “regenerating islet-derived 1 alpha | Hs.1032 | 0.30 +− 0.01 | SEQ. ID. NO. 85 |
| | | (pancreatic stone protein, pancreatic | | | |
| | | thread protein)” | | | |
| 114 | 788511 | “ribosomal protein S6 kinase, 90 kD, | Hs.149957 | 0.29 +− 0.01 | SEQ. ID. NO. 155 |
| | | polypeptide 1” | | | |
| 118 | 283315 | “phosphoglycerate mutase 2 | Hs.46039 | 0.29 +− 0.01 | SEQ. ID. NO. 345 |
| | | (muscle)” | | | |
| 135 | 502333 | “nuclear receptor coactivator 3” | Hs.225977 | 0.27 +− 0.01 | SEQ. ID. NO. 316 |
| 136 | 262920 | “endothelial differentiation-related | Hs.174050 | 0.27 +− 0.01 | SEQ. ID. NO. 347 |
| | | factor 1” | | | |
| 140 | 897177 | “phosphoglycerate mutase 1 (brain)” | Hs.181013 | 0.27 +− 0.01 | SEQ. ID. NO. 348 |
| 146 | 700792 | “cyclin-dependent kinase inhibitor 3 | Hs.84113 | 0.27 +− 0.01 | SEQ. ID. NO. 349 |
| | | (CDK2-associated dual specificity | | | |
| | | phosphatase)” | | | |
| 147 | 626502 | “actin related protein 2/3 complex, | Hs.11538 | 0.27 +− 0.01 | SEQ. ID. NO. 350 |
| | | subunit 1B (41 kD)” | | | |
| 149 | 769657 | “protein phosphatase 1, regulatory | Hs.267819 | 0.27 +− 0.01 | SEQ. ID. NO. 351 |
| | | (inhibitor) subunit 2” | | | |
| 152 | 435953 | “inositol 1,4,5-triphosphate receptor, | Hs.77515 | 0.26 +− 0.01 | SEQ. ID. NO. 144 |
| | | type 3” | | | |
| 155 | 812965 | “v-myc avian myelocytomatosis | Hs.79070 | 0.26 +− 0.01 | SEQ. ID. NO. 82 |
| | | viral oncogene homolog” | | | |
| 159 | 714453 | “interleukin 4 receptor” | Hs.75545 | 0.26 +− 0.01 | SEQ. ID. NO. 83 |
| 163 | 145112 | “intercellular adhesion molecule 1 | Hs.168383 | 0.25 +− 0.01 | SEQ. ID. NO. 352 |
| | | (CD54), human rhinovirus receptor” | | | |
| 164 | 80649 | “Rho-associated, coiled-coil | Hs.17820 | 0.25 +− 0.01 | SEQ. ID. NO. 353 |
| | | containing protein kinase 1” | | | |
| 172 | 240208 | “DKFZP434O125 protein” | Hs.102669 | 0.25 +− 0.01 | SEQ. ID. NO. 354 |
| 174 | 298155 | “acyl-Coenzyme A dehydrogenase, | Hs.79158 | 0.25 +− 0.01 | SEQ. ID. NO. 355 |
| | | C-4 to C-12 straight chain” | | | |
| 176 | 530185 | “CD83 antigen (activated B | Hs.79197 | 0.25 +− 0.01 | SEQ. ID. NO. 356 |
| | | lymphocytes, immunoglobulin | | | |
| | | superfamily)” | | | |
| 185 | 755145 | “villin 2 (ezrin)” | Hs.155191 | 0.24 +− 0.01 | SEQ. ID. NO. 357 |
| 192 | 68977 | “proteasome (prosome, macropain) | Hs.9661 | 0.24 +− 0.01 | SEQ. ID. NO. 358 |
| | | subunit, beta type, 10” | | | |

TABLE 9
Ranked genes for Ewing family of tumors (EWS)

| Rank | Clone Id | GeneDescription | Unigene | Weight | SEQ. ID. NO. |
|---|---|---|---|---|---|
| 2 | 866702 | “protein tyrosine phosphatase, non-receptor type | Hs.211595 | 0.47 +− 0.03 | SEQ. ID. NO. 16 |
| | | 13 (APO-1/CD95 (Fas)-associated phosphatase)” | | | |
| 3 | 770394 | “Fc fragment of IgG, receptor, transporter, alpha” | Hs.160741 | 0.47 +− 0.03 | SEQ. ID. NO. 20 |
| 5 | 377461 | “caveolin 1, caveolae protein, 22 kD” | Hs.281621 | 0.45 +− 0.03 | SEQ. ID. NO. 19 |
| 6 | 357031 | “tumor necrosis factor, alpha-induced protein 6” | Hs.29352 | 0.44 +− 0.03 | SEQ. ID. NO. 18 |
| 7 | 43733 | “glycogenin 2” | Hs.58589 | 0.42 +− 0.03 | SEQ. ID. NO. 21 |
| 9 | 52076 | “olfactomedin related ER localized protein” | Hs.74376 | 0.38 +− 0.02 | SEQ. ID. NO. 13 |
| 10 | 814260 | “follicular lymphoma variant translocation 1” | Hs.74050 | 0.36 +− 0.02 | SEQ. ID. NO. 17 |
| 11 | 755599 | “interferon induced transmembrane protein 1 (9-27)” | Hs.146360 | 0.35 +− 0.02 | SEQ. ID. NO. 25 |
| 13 | 377731 | “glutathione S-transferase M5” | Hs.75652 | 0.34 +− 0.02 | SEQ. ID. NO. 23 |
| 14 | 1473131 | “transducin-like enhancer of split 2, homolog of | Hs.173063 | 0.34 +− 0.02 | SEQ. ID. NO. 15 |
| | | Drosophila E(sp1)” | | | |
| 15 | 823928 | “glutathione S-transferase theta 2” | Hs.1581 | 0.32 +− 0.02 | SEQ. ID. NO. 153 |
| 16 | 1435862 | “antigen identified by monoclonal antibodies | Hs.177543 | 0.32 +− 0.02 | SEQ. ID. NO. 22 |
| | | 12E7, F21 and O13” | | | |
| 17 | 812965 | “v-myc avian myelocytomatosis viral oncogene | Hs.79070 | 0.32 +− 0.02 | SEQ. ID. NO. 82 |
| | | homolog” | | | |
| 18 | 841641 | “cyclin D1 (PRAD1: parathyroid adenomatosis | Hs.82932 | 0.31 +− 0.02 | SEQ. ID. NO. 5 |
| | | 1)” | | | |
| 19 | 208718 | “annexin A1” | Hs.78225 | 0.29 +− 0.02 | SEQ. ID. NO. 2 |
| 20 | 713922 | “glutathione S-transferase M1” | Hs.278633 | 0.29 +− 0.02 | SEQ. ID. NO. 152 |
| 21 | 291756 | “tubulin, beta, 5” | Hs.108014 | 0.29 +− 0.02 | SEQ. ID. NO. 1 |
| 23 | 1323448 | “cysteine-rich protein 1 (intestinal)” | Hs.17409 | 0.28 +− 0.02 | SEQ. ID. NO. 112 |
| 24 | 308497 | “KIAA0467 protein” | Hs.11147 | 0.28 +− 0.02 | SEQ. ID. NO. 24 |
| 25 | 789091 | “H2A histone family, member L” | Hs.28777 | 0.28 +− 0.02 | SEQ. ID. NO. 359 |
| 26 | 1471841 | “ATPase, Na+/K+ transporting, alpha 1 | Hs.190703 | 0.27 +− 0.02 | SEQ. ID. NO. 202 |
| | | polypeptide” | | | |
| 27 | 178825 | “neurogranin (protein kinase C substrate, RC3)” | Hs.26944 | 0.26 +− 0.02 | SEQ. ID. NO. 360 |
| 28 | 810504 | “proteolipid protein 2 (colonic epithelium- | Hs.77422 | 0.25 +− 0.02 | SEQ. ID. NO. 154 |
| | | enriched)” | | | |
| 29 | 740554 | “Homo sapiens mRNA; cDNA DKFZp434I0812 | Hs.263671 | 0.25 +− 0.02 | SEQ. ID. NO. 158 |
| | | (from clone DKFZp434I0812); partial cds” | | | |
| 30 | 24415 | “tumor protein p53 (Li-Fraumeni syndrome)” | Hs.1846 | 0.25 +− 0.02 | SEQ. ID. NO. 188 |
| 31 | 811108 | “thyroid hormone receptor interactor 6” | Hs.119498 | 0.25 +− 0.02 | SEQ. ID. NO. 118 |
| 32 | 770868 | “NGFI-A binding protein 2 (ERG1 binding | Hs.159223 | 0.25 +− 0.01 | SEQ. ID. NO. 190 |
| | | protein 2)” | | | |
| 35 | 80338 | “selenium binding protein 1” | Hs.7833 | 0.24 +− 0.01 | SEQ. ID. NO. 14 |
| 38 | 212640 | “Rho GTPase activating protein 4” | Hs.3109 | 0.24 +− 0.01 | SEQ. ID. NO. 108 |
| 39 | 417226 | “v-myc avian myelocytomatosis viral oncogene | Hs.79070 | 0.24 +− 0.01 | SEQ. ID. NO. 81 |
| | | homolog” | | | |
| 40 | 742132 | “interferon-stimulated protein, 15 kDa” | Hs.833 | 0.23 +− 0.01 | SEQ. ID. NO. 140 |
| 41 | 365826 | “growth arrest-specific 1” | Hs.65029 | 0.23 +− 0.01 | SEQ. ID. NO. 59 |
| 42 | 161993 | “CCAAT/enhancer binding protein (C/EBP), | Hs.99029 | 0.23 +− 0.01 | SEQ. ID. NO. 166 |
| | | beta” | | | |
| 43 | 811000 | “lectin, galactoside-binding, soluble, 3 binding | Hs.79339 | 0.23 +− 0.01 | SEQ. ID. NO. 6 |
| | | protein (galectin 6 binding protein)” | | | |
| 44 | 768205 | “homeo box D9” | Hs.236646 | 0.22 +− 0.01 | SEQ. ID. NO. 361 |
| 48 | 345232 | “lymphotoxin alpha (TNF superfamily, member | Hs.36 | 0.22 +− 0.01 | SEQ. ID. NO. 362 |
| | | 1)” | | | |
| 49 | 586854 | “CGI-119 protein” | Hs.25615 | 0.22 +− 0.01 | SEQ. ID. NO. 201 |
| 52 | 744417 | “carnitine acetyltransferase” | Hs.12068 | 0.21 +− 0.01 | SEQ. ID. NO. 363 |
| 53 | 364934 | “death-associated protein kinase 1” | Hs.153924 | 0.21 +− 0.01 | SEQ. ID. NO. 12 |
| 54 | 809694 | “cellular retinoic acid-binding protein 1” | Hs.7678 | 0.21 +− 0.01 | SEQ. ID. NO. 364 |
| 55 | 491565 | “Cbp/p300-interacting transactivator, with | Hs.82071 | 0.21 +− 0.01 | SEQ. ID. NO. 365 |
| | | Glu/Asp-rich carboxy-terminal domain, 2” | | | |
| 56 | 1470048 | “lymphocyte antigen 6 complex, locus E” | Hs.77667 | 0.21 +− 0.01 | SEQ. ID. NO. 366 |
| 57 | 814266 | “protein kinase C, zeta” | Hs.78793 | 0.21 +− 0.01 | SEQ. ID. NO. 367 |
| 58 | 296030 | “ESTs” | Hs.10362 | 0.21 +− 0.01 | SEQ. ID. NO. 368 |
| 59 | 379708 | “chromodomain helicase DNA binding protein 3” | Hs.25601 | 0.21 +− 0.01 | SEQ. ID. NO. 176 |
| 60 | 755506 | “annexin A4” | Hs.77840 | 0.20 +− 0.01 | SEQ. ID. NO. 177 |
| 61 | 39796 | “3-hydroxymethyl-3-methylglutaryl-Coenzyme A | Hs.831 | 0.20 +− 0.01 | SEQ. ID. NO. 369 |
| | | lyase (hydroxymethylglutaricaciduria)” | | | |
| 62 | 741885 | “transcription factor binding to IGHM enhancer | Hs.274184 | 0.20 +− 0.01 | SEQ. ID. NO. 370 |
| | | 3” | | | |
| 63 | 271102 | “copper chaperone for superoxide dismutase” | Hs.5002 | 0.20 +− 0.01 | SEQ. ID. NO. 371 |
| 64 | 470261 | “SMA3” | Hs.251397 | 0.20 +− 0.01 | SEQ. ID. NO. 372 |
| 66 | 745343 | “regenerating islet-derived 1 alpha (pancreatic | Hs.1032 | 0.20 +− 0.01 | SEQ. ID. NO. 85 |
| | | stone protein, pancreatic thread protein)” | | | |
| 67 | 563673 | “antiquitin 1” | Hs.74294 | 0.20 +− 0.01 | SEQ. ID. NO. 10 |
| 68 | 39093 | “methionine aminopeptidase; eIF-2-associated | Hs.78935 | 0.20 +− 0.01 | SEQ. ID. NO. 63 |
| | | p67” | | | |
| 75 | 234376 | “Homo sapiens mRNA; cDNA DKFZp564F112 | Hs.166361 | 0.19 +− 0.01 | SEQ. ID. NO. 373 |
| | | (from clone DKFZp564F112)” | | | |
| 76 | 810133 | “ESTs” | Hs.10362 | 0.19 +− 0.01 | SEQ. ID. NO. 374 |
| 78 | 815239 | “Rho guanine nucleotide exchange factor (GEF) | Hs.252280 | 0.19 +− 0.01 | SEQ. ID. NO. 161 |
| | | 1” | | | |
| 80 | 172751 | “amyloid beta (A4) precursor protein-binding, | Hs.4880 | 0.18 +− 0.01 | SEQ. ID. NO. 375 |
| | | family A, member 1 (X11)” | | | |
| 81 | 289645 | “amyloid beta (A4) precursor-like protein 1” | Hs.74565 | 0.18 +− 0.01 | SEQ. ID. NO. 4 |
| 84 | 769579 | “mitogen-activated protein kinase kinase 2” | Hs.72241 | 0.18 +− 0.01 | SEQ. ID. NO. 376 |
| 85 | 1422723 | “interferon-induced protein 35” | Hs.50842 | 0.18 +− 0.01 | SEQ. ID. NO. 377 |
| 86 | 296880 | “membrane protein, palmitoylated 1 (55 kD)” | Hs.1861 | 0.18 +− 0.01 | SEQ. ID. NO. 378 |
| 87 | 744052 | “nuclear receptor subfamily 1, group H, member | Hs.100221 | 0.18 +− 0.01 | SEQ. ID. NO. 379 |
| | | 2” | | | |
| 88 | 782503 | “Homo sapiens clone 23716 mRNA sequence” | Hs.12214 | 0.18 +− 0.01 | SEQ. ID. NO. 7 |
| 89 | 1434905 | “homeo box B7” | Hs.819 | 0.18 +− 0.01 | SEQ. ID. NO. 178 |
| 90 | 212542 | “Homo sapiens mRNA; cDNA DKFZp586J2118 | Hs.21851 | 0.18 +− 0.01 | SEQ. ID. NO. 53 |
| | | (from clone DKFZp586J2118)” | | | |
| 91 | 506548 | “regulator of G-protein signalling 10” | Hs.82280 | 0.18 +− 0.01 | SEQ. ID. NO. 380 |
| 93 | 768443 | “microsomal glutathione S-transferase 1” | Hs.790 | 0.18 +− 0.01 | SEQ. ID. NO. 381 |
| 94 | 75923 | “Human zinc finger protein mRNA, complete | Hs.78765 | 0.18 +− 0.01 | SEQ. ID. NO. 382 |
| | | cds” | | | SEQ. ID. NO. |
| 97 | 1475595 | “alkaline phosphatase, liver/bone/kidney” | Hs.250769 | 0.17 +− 0.01 | SEQ. ID. NO. 383 |
| 99 | 231355 | “vesicle-associated membrane protein 2 | Hs.194534 | 0.17 +− 0.01 | SEQ. ID. NO. 384 |
| | | (synaptobrevin 2)” | | | |
| 100 | 841620 | “dihydropyrimidinase-like 2” | Hs.173381 | 0.17 +− 0.01 | SEQ. ID. NO. 8 |
| 101 | 1456900 | “dipeptidase 1 (renal)” | Hs.109 | 0.17 +− 0.01 | SEQ. ID. NO. 385 |
| 103 | 773246 | “ring finger protein 1” | Hs.35384 | 0.17 +− 0.01 | SEQ. ID. NO. 386 |
| 104 | 191743 | “ESTs” | Hs.94814 | 0.17 +− 0.01 | SEQ. ID. NO. 387 |
| 105 | 265874 | “nuclear factor I/C (CCAAT-binding | Hs.184771 | 0.17 +− 0.01 | SEQ. ID. NO. 388 |
| | | transcription factor)” | | | |
| 106 | 767345 | “ESTs, Moderately similar to I59372 cadherin 12 - | Hs.44898 | 0.17 +− 0.01 | SEQ. ID. NO. 389 |
| | | human [H. sapiens]” | | | |
| 107 | 729964 | “sphingomyelin phosphodiesterase 1, acid | Hs.77813 | 0.17 +− 0.01 | SEQ. ID. NO. 390 |
| | | lysosomal (acid sphingomyelinase)” | | | |
| 108 | 768644 | “zona pellucida glycoprotein 3A (sperm | Hs.250867 | 0.17 +− 0.01 | SEQ. ID. NO. 391 |
| | | receptor)” | | | |
| 111 | 858469 | “thrombospondin 3” | Hs.169875 | 0.17 +− 0.01 | SEQ. ID. NO. 392 |
| 112 | 756556 | “complement component 1 inhibitor | Hs.151242 | 0.17 +− 0.01 | SEQ. ID. NO. 65 |
| | | (angioedema, hereditary)” | | | |
| 113 | 190887 | “myeloid differentiation primary response gene | Hs.82116 | 0.17 +− 0.01 | SEQ. ID. NO. 169 |
| | | (88)” | | | |
| 114 | 1475730 | “chaperonin containing TCP1, subunit 6A (zeta | Hs.82916 | 0.17 +− 0.01 | SEQ. ID. NO. 393 |
| | | 1)” | | | |
| 115 | 137158 | “chromogranin A (parathyroid secretory protein | Hs.172216 | 0.17 +− 0.01 | SEQ. ID. NO. 394 |
| | | 1)” | | | |
| 116 | 897774 | “adenine phosphoribosyltransferase” | Hs.28914 | 0.17 +− 0.01 | SEQ. ID. NO. 395 |
| 120 | 757248 | “calpain, large polypeptide L3” | Hs.40300 | 0.17 +− 0.01 | SEQ. ID. NO. 396 |
| 124 | 811920 | “interleukin 11 receptor, alpha” | Hs.64310 | 0.16 +− 0.01 | SEQ. ID. NO. 397 |
| 125 | 824602 | “interferon, gamma-inducible protein 16” | Hs.155530 | 0.16 +− 0.01 | SEQ. ID. NO. 84 |
| 126 | 150702 | “homeo box B5” | Hs.22554 | 0.16 +− 0.01 | SEQ. ID. NO. 398 |
| 127 | 37553 | “protein phosphatase 2A, regulatory subunit B′ | Hs.236963 | 0.16 +− 0.01 | SEQ. ID. NO. 399 |
| | | (PR 53)” | | | |
| 128 | 139957 | “hypothetical protein FLJ11181” | Hs.28472 | 0.16 +− 0.01 | SEQ. ID. NO. 400 |
| 130 | 343646 | “v-ski avian sarcoma viral oncogene homolog” | Hs.2969 | 0.16 +− 0.01 | SEQ. ID. NO. 401 |
| 131 | 1031748 | “synovial sarcoma, X breakpoint 3” | Hs.178749 | 0.16 +− 0.01 | SEQ. ID. NO. 402 |
| 132 | 166236 | “glucose-6-phosphate dehydrogenase” | Hs.80206 | 0.16 +− 0.01 | SEQ. ID. NO. 403 |
| 133 | 740801 | “branched chain keto acid dehydrogenase E1, | Hs.78950 | 0.16 +− 0.01 | SEQ. ID. NO. 404 |
| | | alpha polypeptide (maple syrup urine disease)” | | | |
| 134 | 120468 | “excision repair cross-complementing rodent | Hs.59544 | 0.16 +− 0.01 | SEQ. ID. NO. 405 |
| | | repair deficiency, complementation group 1 | | | |
| | | (includes overlapping antisense sequence)” | | | |
| 137 | 785967 | “erythrocyte membrane protein band 4.1-like 2” | Hs.7857 | 0.16 +− 0.01 | SEQ. ID. NO. 406 |
| 139 | 361943 | “Meis1 (mouse) homolog” | Hs.170177 | 0.16 +− 0.01 | SEQ. ID. NO. 407 |
| 140 | 810551 | “low density lipoprotein-related protein 1 (alpha- | Hs.89137 | 0.16 +− 0.01 | SEQ. ID. NO. 206 |
| | | 2-macroglobulin receptor)” | | | |
| 141 | 841698 | “exostoses (multiple) 1” | Hs.184161 | 0.16 +− 0.01 | SEQ. ID. NO. 408 |
| 142 | 753104 | “dopachrome tautomerase (dopachrome delta- | Hs.240217 | 0.16 +− 0.01 | SEQ. ID. NO. 409 |
| | | isomerase, tyrosine-related protein 2)” | | | |
| 143 | 878798 | “beta-2-microglobulin” | Hs.75415 | 0.16 +− 0.01 | SEQ. ID. NO. 410 |
| 145 | 811900 | “lymphotoxin beta receptor (TNFR superfamily, | Hs.1116 | 0.16 +− 0.01 | SEQ. ID. NO. 411 |
| | | member 3” | | | |
| 146 | 741831 | “phospholipid transfer protein” | Hs.154854 | 0.15 +− 0.01 | SEQ. ID. NO. 412 |
| 147 | 549146 | “stimulated trans-acting factor (50 kDa)” | Hs.68054 | 0.15 +− 0.01 | SEQ. ID. NO. 413 |
| 149 | 841340 | “ATP-binding cassette, sub-family B | Hs.158164 | 0.15 +− 0.01 | SEQ. ID. NO. 414 |
| | | (MDR/TAP), member 2” | | | |
| 153 | 42576 | “ubiquitin-activating enzyme E1 (A1S9T and | Hs.2055 | 0.15 +− 0.01 | SEQ. ID. NO. 415 |
| | | BN75 temperature sensitivity complementing)” | | | |
| 154 | 53039 | “carbohydrate (keratan sulfate Gal-6) | Hs.104576 | 0.15 +− 0.01 | SEQ. ID. NO. 416 |
| | | sulfotransferase 1” | | | |
| 155 | 308163 | “ESTs” | Hs.84520 | 0.15 +− 0.01 | SEQ. ID. NO. 57 |
| 157 | 949938 | “cystatin C (amyloid angiopathy and cerebral | Hs.135084 | 0.15 +− 0.01 | SEQ. ID. NO. 417 |
| | | hemorrhage)” | | | |
| 158 | 166195 | “ribonuclease/angiogenin inhibitor” | Hs.75108 | 0.15 +− 0.01 | SEQ. ID. NO. 418 |
| 159 | 239611 | “hemoglobin, epsilon 1” | Hs.117848 | 0.15 +− 0.01 | SEQ. ID. NO. 419 |
| 160 | 36950 | “phosphofructokinase, liver” | Hs.155455 | 0.15 +− 0.01 | SEQ. ID. NO. 420 |
| 161 | 82903 | “TAP binding protein (tapasin)” | Hs.179600 | 0.15 +− 0.01 | SEQ. ID. NO. 141 |
| 162 | 183440 | “arylsulfatase A” | Hs.88251 | 0.15 +− 0.01 | SEQ. ID. NO. 421 |
| 163 | 787857 | “syntaxin 5A” | Hs.154546 | 0.15 +− 0.01 | SEQ. ID. NO. 422 |
| 164 | 840821 | “signal sequence receptor, delta (translocon- | Hs.102135 | 0.15 +− 0.01 | SEQ. ID. NO. 423 |
| | | associated protein delta)” | | | |
| 165 | 760148 | “uroporphyrinogen decarboxylase” | Hs.78601 | 0.15 +− 0.01 | SEQ. ID. NO. 424 |
| 166 | 1434948 | “HIV TAT specific factor 1” | Hs.171595 | 0.15 +− 0.01 | SEQ. ID. NO. 425 |
| 167 | 897788 | “protein tyrosine phosphatase, receptor type, F” | Hs.75216 | 0.15 +− 0.01 | SEQ. ID. NO. 9 |
| 168 | 810124 | “platelet-activating factor acetylhydrolase, | Hs.6793 | 0.15 +− 0.01 | SEQ. ID. NO. 426 |
| | | isoform Ib, gamma subunit (29 kD)” | | | |
| 169 | 50359 | “mannose phosphate isomerase” | Hs.75694 | 0.15 +− 0.01 | SEQ. ID. NO. 427 |
| 170 | 221826 | “guanine nucleotide binding protein (G protein), | Hs.1686 | 0.15 +− 0.01 | SEQ. ID. NO. 428 |
| | | alpha 11 (Gq class)” | | | |
| 171 | 753587 | “butyrophilin, subfamily 3, member A3” | Hs.167741 | 0.15 +− 0.01 | SEQ. ID. NO. 429 |
| 172 | 839980 | “glucose-6-phosphatase, transport (glucose-6- | Hs.26655 | 0.15 +− 0.01 | SEQ. ID. NO. 430 |
| | | phosphate) protein 1” | | | |
| 173 | 33327 | “Homo sapiens mRNA for KIAA1232 protein, | Hs.11101 | 0.15 +− 0.01 | SEQ. ID. NO. 431 |
| | | partial cds” | | | |
| 174 | 711961 | “general transcription factor IIF, polypeptide 1 | Hs.68257 | 0.15 +− 0.01 | SEQ. ID. NO. 432 |
| | | (74 kD subunit)” | | | |
| 175 | 809910 | “interferon induced transmembrane protein 3 (1- | Hs.182241 | 0.15 +− 0.01 | SEQ. ID. NO. 55 |
| | | 8U)” | | | |
| 180 | 172783 | “hypothetical protein FLJ10390” | Hs.133475 | 0.15 +− 0.01 | SEQ. ID. NO. 433 |
| 182 | 1374571 | “paired basic amino acid cleaving enzyme (furin, | Hs.59242 | 0.14 +− 0.01 | SEQ. ID. NO. 434 |
| | | membrane associated receptor protein)” | | | |
| 183 | 138936 | “erythrocyte membrane protein band 7.2 | Hs.160483 | 0.14 +− 0.01 | SEQ. ID. NO. 435 |
| | | (stomatin)” | | | |
| 186 | 795321 | “mannosidase, alpha, class 2A, member 2” | Hs.182923 | 0.14 +− 0.01 | SEQ. ID. NO. 436 |
| 188 | 263727 | “DNA segment, single copy probe LNS- | Hs.178112 | 0.14 +− 0.01 | SEQ. ID. NO. 437 |
| | | CAI/LNS-CAII (deleted in polyposis” | | | |
| 189 | 75009 | “EphB4” | Hs.155227 | 0.14 +− 0.01 | SEQ. ID. NO. 438 |
| 190 | 435953 | “inositol 1,4,5-triphosphate receptor, type 3” | Hs.77515 | 0.14 +− 0.01 | SEQ. ID. NO. 144 |
| 191 | 782335 | “ESTs” | Hs.38270 | 0.14 +− 0.01 | SEQ. ID. NO. 439 |
| 194 | 754600 | “nuclear factor I/X (CCAAT-binding | Hs.35841 | 0.14 +− 0.01 | SEQ. ID. NO. 440 |
| | | transcription factor)” | | | |
| 195 | 213890 | “2,4-dienoyl CoA reductase 1, mitochondrial” | Hs.81548 | 0.14 +− 0.01 | SEQ. ID. NO. 441 |
| 197 | 1472735 | “metallothionein 1E (functional)” | Hs.74170 | 0.14 +− 0.01 | SEQ. ID. NO. 442 |
| 199 | 781097 | “reticulon 3” | Hs.252831 | 0.14 +− 0.01 | SEQ. ID. NO. 443 |
| 200 | 810057 | “cold shock domain protein A” | Hs.1139 | 0.14 +− 0.01 | SEQ. ID. NO. 105 |

[0198] Alternatively, the genes expressed in the Tables 6 through 9 that are expressed in high levels in the specific cancers can be used as targets for designing vaccines for therapy and for making specific antibodies against and used to target these cancers. Also these genes or their protein products can be inhibited via a variety of methods including oligonucleotide DNA antisense, RNAi (making double stranded siRNA inhibitors, and drugs including small molecules and therefore be be used for treatment of these cancers. Genes found in this manner, such as those shown in Tables 6 through 9 can be used in microarrays. For example, microarrays including any combination of at least one of the 200 genes from Table 5 can be fabricated.

[0199] Alternatively, Table 10 shows 19 genes that were found using a method of the invention and are involved with signal transduction. Signal transduction proteins can be important targets for therapy since they pass on signals from the outside of the cell to the nucleus to either survive or proliferate. Of this list of genes only the first (clone ID 200814 (SEQ. ID. NO. 94) has been previously used as a specific target for leukemia/lymphoma therapy. The remainder of the genes are novel targets. For example, FGFR4 (SEQ. ID. NO. 71), a tyrosine kinase receptor that is expressed during myogenesis and prevents terminal differentiation in myocytes, was found to be highly expressed only in RMS, and in particular not in normal muscle. The relatively strong differential expression of FGFR4 (SEQ. ID. NO. 71) in RMS was confirmed by immunostaining of tissue microarrays. The high expression of FGFR4 (SEQ. ID. NO. 71) in most cases of RMS suggests that it may be relevant to the biology of this tumor, it is also expressed in some other cancers. This suggests that, FGFR4 (SEQ. ID. NO. 71) expression in RMS is of biological and therapeutic interest.

TABLE 10
Genes involved with signal transduction

| name | CloneID | diagnosis | summaryfunction | SEQ. ID. NO. |
|---|---|---|---|---|
| membrane metallo- | 200814 | BL | Enkephalinase; membrane zinc | SEQ. ID. NO. 94 |
| endopeptidase | | | metalloendopeptidase, may | |
| (neutral | | | inactivate peptide | |
| endopeptidase, | | | hormones\|Proteome | |
| enkephalinase, | | | | |
| CALLA, CD10) | | | | |
| protein tyrosine | 897788 | NOTBL | Receptor-type protein tyrosine | SEQ. ID. NO. 9 |
| phosphatase, | | | phosphatase F; interacts with the | |
| receptor type, F | | | insulin receptor; has Ig-like and | |
| | | | FN-III repeats in the extracellular | |
| | | | domain\|Proteome | |
| protein kinase, | 609663 | BL* | Type II regulatory beta subunit of | SEQ. ID. NO. 95 |
| cAMP-dependent, | | | cAMP-dependent protein kinase | |
| regulatory, type II, | | | (PKA)\|Proteome | |
| beta | | | | |
| annexin A1 | 208718 | EWS* | Annexin I (lipocortin 1); Ca2+- | SEQ. ID. NO. 2 |
| | | | dependent phospholipid-binding | |
| | | | protein, inhibits phospholipase A2 | |
| | | | and has anti-inflammatory | |
| | | | activity\|Proteome | |
| interleukin 4 | 714453 | RMS_BL | Subunit of the interleukin 4 | SEQ. ID. NO. 83 |
| receptor | | | receptor; member of the cytokine | |
| | | | receptor family\|Proteome | |
| recoverin | 383188 | NB* | Recoverin; calcium-binding | SEQ. ID. NO. 38 |
| | | | protein that activates guanylate | |
| | | | cyclase activity\|Proteome | |
| fibroblast growth | 784224 | RMS* | Fibroblast growth factor receptor | SEQ. ID. NO. 71 |
| factor receptor 4 | | | 4; receptor tyrosine kinase, | |
| | | | preferentially binds acidic FGF; | |
| | | | contains three extracellular | |
| | | | immunoglobulin-like | |
| | | | domains\|Proteome | |
| transducin-like | 1473131 | EWS* | Enhancer of split groucho 2; | SEQ. ID. NO. 15 |
| enhancer of split 2, | | | possibly functions during | |
| homolog of | | | epithelial differentiation; | |
| Drosophila E(sp1) | | | transducin-like, similar to | |
| | | | Drosophila E(spI) m9/10, which | |
| | | | is required for cell fate | |
| | | | decisions\|Proteome | |
| tumor necrosis | 357031 | EWS* | Similar to CD44; binds | SEQ. ID. NO. 18 |
| factor, alpha- | | | hyaluronate and may be involved | |
| induced protein 6 | | | in cell-cell communication during | |
| | | | the immune response\|Proteome | |
| ras homolog gene | 768370 | NOTBL | Ras-related GTP binding protein | SEQ. ID. NO. 46 |
| family, member B | | | of the rho subfamily, member B; | |
| | | | may regulate assembly of actin | |
| | | | stress fibers and focal adhesions; | |
| | | | very strongly similar to murine | |
| | | | Arhb\|Proteome | |
| insulin-like growth | 245330 | RMS | Insulin-like growth factor II | SEQ. ID. NO. 78 |
| factor 2 | | | (somatomedin A); member of the | |
| (somatomedin A) | | | insulin protein family\|Proteome | |
| hematopoietic cell- | 767183 | BL | Contains a helix-turn-helix DNA | SEQ. ID. NO. 91 |
| specific Lyn | | | binding domain and an SH3 | |
| substrate 1 | | | domain\|Proteome | |
| dihydropyrimidinase- | 841620 | EWS_NB | Member of the | SEQ. ID. NO. 8 |
| like 2 | | | dihydropyrimidinase | |
| | | | family\|Proteome | |
| amyloid beta (A4) | 323371 | NOTBL | Amyloid beta precursor protein | SEQ. ID. NO. 27 |
| precursor protein | | | (protease nexin-II); cell surface | |
| (protease nexin-II, | | | protease inhibitor; reduces | |
| Alzheimer disease) | | | Cu\|Proteome | |
| interferon induced | 755599 | EWS* | Interferon-inducible | SEQ. ID. NO. 25 |
| transmembrane | | | transmembrane protein 1; | |
| protein 1 (9-27) | | | involved in relaying | |
| | | | antiproliferative and homotypic | |
| | | | adhesion signals\|Proteome | |
| secreted frizzled- | 82225 | NB* | Secreted frizzled-related protein | SEQ. ID. NO. 42 |
| related protein 1 | | | 1; may have an anti-apoptotic | |
| | | | function and inhibit Wnt protein | |
| | | | activity; strongly similar to | |
| | | | murine Sfrp1\|Proteome | |
| death-associated | 364934 | EWS* | Death associated protein kinase 1; | SEQ. ID. NO. 12 |
| protein kinase 1 | | | serine/threonine kinase regulated | |
| | | | by calmodulin, may mediate | |
| | | | apoptosis induced by interferon- | |
| | | | gamma; has ankyrin | |
| | | | repeats\|Proteome | |
| lectin, galactoside- | 811000 | EWS_NB | Mac-2-binding protein; potent | SEQ. ID. NO. 6 |
| binding, soluble, 3 | | | immune stimulator; contains a | |
| binding protein | | | macrophage scavenger receptor | |
| | | | cysteine-rich domain\|Proteome | |
| insulin-like growth | 2907511 | RMS | Member of the insulin-like | SEQ. ID. NO. 444 |
| factor binding | | | growth factor binding family of | |
| protein 5 | | | proteins; may bind to and | |
| | | | modulate insulin-like growth | |
| | | | factor activity\|Proteome | |

[0200] We then determined the classification error rate using increasing numbers of these ranked genes. The classification error rate minimized to 0% at 96 genes, see FIG. 5. The 10 dominant PCA components for these 96 genes contained 79% of the variance in the data matrix. Using only these 96 genes, we recalibrated the ANN models and again correctly classified all 63 samples, see FIG. 6. Moreover, multidimensional scaling (MDS) analysis using these 96 genes clearly separated the four cancer types, see FIG. 7. The top 96 discriminators represented 93 unique genes, see FIG. 8, as IGF2 was represented by three independent clones and MYC by two.

[0201] Of the 96 genes, 13 were anonymous expressed sequence tags (ESTs); 16 genes were specifically expressed in EWS, 20 in RMS, 15 in NB and 10 in BL. Twelve genes were good discriminators on the basis of lack of expression in BL and variable expression in the other three types. One gene (EST; Clone ID 295985 (SEQ. ID. NO. 26)) discriminated EWS from other cancer types by its lack of expression in this cancer. The remainder of the genes was expressed in two of the four cancer types. To our knowledge, of the 61 genes that were specifically expressed in cancer type, 41 have not been previously reported as associated with these diseases. These 41 genes can be seen in Table 2 given above.

### Example 5

### Diagnostic Classification and Hierarchical Clustering

[0202] The diagnostic classification capabilities of these ANN models were then tested on a set of 25 blinded test samples. Samples were classified to a diagnostic category if they received the highest vote for that category. As this classifier had only four possible outputs, all samples were classified to one of the four categories. We therefore established a diagnostic classification method based on a statistical cutoff to enable us to reject a diagnosis of a sample classified to a given category. If a sample falls outside the 95th percentile of the probability distribution of distances between samples and their ideal output (for example for EWS it is EWS=1, RMS=NB=BL=0), its diagnosis is rejected.

TABLE 11

| Sample | ANN committee vote | | | | ANN | ANN | Histological | Source | |
|---|---|---|---|---|---|---|---|---|---|
| label | EWS | RMS | NB | BL | classification | diagnosis | diagnosis | label | Source |
| Test 1 | 0.01 | 0.07 | 0.76 | 0.06 | NB | NB | NB-C | IMR32 | ATCC |
| Test 2 | 0.67 | 0.06 | 0.08 | 0.09 | EWS | EWS | EWS-C | CHOP1 | NCI |
| Test 3 | 0.11 | 0.17 | 0.16 | 0.11 | RMS | — | Osteosarcoma-C | OsA-Cl | ATCC |
| Test 4 | 0.00 | 0.95 | 0.06 | 0.03 | RMS | RMS | ARMS-T | ARMD1 | CHTN |
| Test 5 | 0.11 | 0.11 | 0.25 | 0.10 | NB | — | Sarcoma-C | A204 | ATCC |
| Test 6 | 0.98 | 0.04 | 0.10 | 0.03 | EWS | EWS | EWS-T | 9608P053 | CHTN |
| Test 7 | 0.05 | 0.02 | 0.05 | 0.93 | BL | BL | BL-C | EB1 | ATCC |
| Test 8 | 0.00 | 0.05 | 0.94 | 0.04 | NB | NB | NB-C | SMSSAN | NCI |
| Test 9 | 0.22 | 0.60 | 0.03 | 0.06 | RMS | — | Sk. Muscle | SkM1 | CHTN |
| Test 10 | 0.10 | 0.68 | 0.11 | 0.04 | RMS | — | ERMS-T | ERDM1 | CHTN |
| Test 11 | 0.39 | 0.04 | 0.28 | 0.15 | EWS | — | Prostate Ca.-C | PC3 | ATCC |
| Test 12 | 0.89 | 0.05 | 0.14 | 0.03 | EWS | EWS | EWS-T | SARC67 | CHTN |
| Test 13 | 0.20 | 0.7 | 0.03 | 0.05 | RMS | — | Sk. Muscle | SkM2 | CHTN |
| Test 14 | 0.03 | 0.02 | 0.90 | 0.07 | NB | NB | NB-T | NB3 | DZNSG |
| Test 15 | 0.06 | 0.03 | 0.05 | 0.91 | BL | BL | BL-C | EB2 | ATCC |
| Test 16 | 0.03 | 0.02 | 0.93 | 0.05 | NB | NB | NB-T | NB1 | DZNSG |
| Test 17 | 0.01 | 0.90 | 0.05 | 0.03 | RMS | RMS | ARMS-T | ARMD2 | CHTN |
| Test 18 | 0.06 | 0.04 | 0.04 | 0.88 | BL | BL | BL-C | GA10 | ATCC |
| Test 19 | 0.99 | 0.02 | 0.04 | 0.05 | EWS | EWS | EWS-T | ET3 | CHTN |
| Test 20 | 0.40 | 0.30 | 0.10 | 0.06 | EWS | — | EWS-T | 9903P1339 | CHTN |
| Test 21 | 0.81 | 0.19 | 0.12 | 0.04 | EWS | EWS | EWS-T | ESZ3 | MSkCC |
| Test 22 | 0.01 | 0.88 | 0.09 | 0.04 | RMS | RMS | ERMS-T | ERMD2 | CHTN |
| Test 23 | 0.07 | 0.08 | 0.70 | 0.06 | NB | NB | NB-T | NB2 | DZNSG |
| Test 24 | 0.05 | 0.87 | 0.06 | 0.03 | RMS | RMS | ERMS-T | DMS4 | MSKCC |
| Test 25 | 0.05 | 0.02 | 0.89 | 0.06 | NB | NB | NB-T | NB4 | DZNSG |

Source label refers to the original name of the sample as designated by the source. Histological diagnosis is defined as cancer type suffixed with -T for a tumor sample and -C for a cell line. Normal skeletal muscle (Sk. Muscle) is also included in the test set.
The ANN classification as determined by the committee vote is bolded.
NCI: National Cancer Institute, National Institutes of Health,
ATCC: American Type Culture Collection,
MSkCC: Memorial Sloan-Kettering Cancer Center,
CHTN: Cooperative Human Tissue Network,
DZNSG: German Cancer Research Center, Heidelberg.

[0203] The test samples contained both tumors (5 EWS, 5 RMS and 4 NB) and cell lines (1 EWS, 2 NB and 3 BL). The ability of these models to reject a diagnosis on 5 non-SRBCTs was also tested (consisting of 2 normal muscle tissues (Tests 9 and 13) and 3 cell lines including an undifferentiated sarcoma (Test 5), osteosarcoma (Test 3) and a prostate carcinoma (Test 11)). Using the 3750 ANN models calibrated with the 96 genes, we correctly classified 100% of the 20 SRBCT tests (FIG. 6 and Table 11) as well as all 63 training samples, see Table 4. Three of these samples, Test 10, Test 20 and EWS-T13 were correctly assigned to their categories (RMS, EWS and EWS respectively), having received the highest vote for their respective categories. However, their distance from a perfect vote was greater than the expected 95th percentile distance (FIG. 6); therefore, we could not confidently diagnose them by this criterion. All of the five non-SRBCT samples were excluded from any of the four diagnostic categories, since they fell outside the 95th percentiles. Using these criteria for all 88 samples, the sensitivity of the ANN models for diagnostic classification was 93% for EWS, 96% for RMS and 100% for both NB and BL. The specificity was 100% for all four diagnostic categories.

[0204] Also, hierarchical clustering using the 96 genes, identified from the ANN models, correctly clustered all 20 of the test samples (FIG. 9). Moreover, the two pairs of samples that were derived from two cell lines, BL-C2 and C4 (ST486) and NB-C2 and C7 (GICAN), were adjacent to one another in the same cluster.

### Example 6

### Expression of FGFR4 on SRBCT Tissue Array

[0205] To confirm the effectiveness of the ANN models to identify genes that show preferential high expression in specific cancer types at the protein level, we performed immunohistochemistry on SRBCT tissue arrays for the expression of fibroblast growth factor receptor 4 (FGFR4 (SEQ. ID. NO. 71)). This tyrosine kinase receptor is expressed during myogenesis but not in adult muscle, and is of interest because of its potential role in tumor growth and in prevention of terminal differentiation in muscle. Moderate to strong cytoplasmic immunostaining for FGFR4 (SEQ. ID. NO. 71) was seen in all 26 RMSs tested (17 alveolar, 9 embryonal). We also observed generally weaker staining in EWS and BL in agreement with the microarray results, except for one of anaplastic large cell lymphoma that was strongly positive (data not shown).

[0206] As such, the foregoing description of the exemplary embodiments of the invention has been presented for the purposes of illustration and description. They are not intended to be exhaustive or to limit the invention to the precise forms disclosed. Many modifications and variations are possible in light of the above teaching. It is intended that the scope of the invention be limited not with this detailed description, but rather by the claims appended hereto. The present invention is presently embodied as a method, apparatus, and a computer data product containing a computer program for classifying and diagnosing disease using artificial neural networks.

[0207] The above specification, examples and data provide a complete description of the manufacture and use of the composition of the invention. Since many embodiments of the invention can be made without departing from the spirit and scope of the invention, the invention resides in the claims hereinafter appended.

1. A selection of genes expressed in a cancer cell, said gene selection functioning to characterize the cancer when the expression of said gene selection from said cancer cell is compared to the expression of an identical selection of genes from a noncancerous cell.

2. The gene selection of claim 1, wherein said cancer to be identified is neuroblastoma.

3. The gene selection of claim 1, wherein said cancer to be identified is rhabdomyosarcoma.

4. The gene selection of claim 1, wherein said cancer to be identified is Burkitt's.

5. The gene selection of claim 1, wherein said cancer to be identified is Ewing family of tumors.

6. The gene selection of claim 1, wherein said genes are chosen from table 5.

7. The gene selection of claim 1, wherein said genes are chosen from table 2.

8. The gene selection of claim 1, wherein said genes are chosen from table 2b.

9. The gene selection of claim 1 comprising at least 9 genes chosen from table 5.

10. The gene selection of claim 9, wherein said at least 9 genes are selected from the top ranked genes.

11. The gene selection of claim 2, wherein said gene selection comprises at least one of the genes with the following Image Id.: 8 12105 (SEQ. ID. NO. 32), 383188 (SEQ. ID. NO. 38), 82225 (SEQ. ID. NO. 42), 878280 (SEQ. ID. NO. 33), 135688 (SEQ. ID. NO. 44), 308231 (SEQ. ID. NO. 39), 486110 (SEQ. ID. NO. 45), 377048 (SEQ. ID. NO. 40), 784257 (SEQ. ID. NO. 34), 395708 (SEQ. ID. NO. 30), 292522 (SEQ. ID. NO. 36), or 813266 (SEQ. ID. NO. 47).

12. The gene selection of claim 3, wherein said gene selection comprises at least one of the following genes with the following Image Id.: 244618 (SEQ. ID. NO. 77), 298062 (SEQ. ID. NO. 74), 324494 (SEQ. ID. NO. 62), 122159 (SEQ. ID. NO. 66), 788107 (SEQ. ID. NO. 52), 377671 (SEQ. ID. NO. 68), 784224 (SEQ. ID. NO. 71), 293500 (SEQ. ID. NO. 80), 42558 (SEQ. ID. NO. 79), 246377 (SEQ. ID. NO. 51), 809901 (SEQ. ID. NO. 67), 769959 (SEQ. ID. NO. 69), or 755750 (SEQ. ID. NO. 49).

13. The gene selection of claim 4, wherein said gene selection comprises at least one of the following genes with the following Image Id.: 609663 (SEQ. ID. NO. 99, or 868304 (SEQ. ID. NO. 86).

14. The gene selection of claim 5, wherein said gene selection comprises at least one of the following genes with the following Image Id.: 770394 (SEQ. ID. NO. 20), 866702 (SEQ. ID. NO. 16), 357031 (SEQ. ID. NO. 18), 377461 (SEQ. ID. NO. 19), 52076 (SEQ. ID. NO. 13), 1473131 (SEQ. ID. NO. 15), 208718 (SEQ. ID. NO. 2), 80338 (SEQ. ID. NO. 14), 377731 (SEQ. ID. NO. 23), 814260 (SEQ. ID. NO. 17), 364934 (SEQ. ID. NO. 12), 755599 (SEQ. ID. NO. 25), 291756 (SEQ. ID. NO. 1), 308497 (SEQ. ID. NO. 24), or combinations thereof.

15. A product of the gene selection of claim 1, wherein said product is mRNA, proteins, cDNA, DNA, antibodies, vaccine, or combinations thereof.

16. A selection of genes expressed in a cancer cell, said gene selection functioning to characterize the cancer when the expression of said gene selection from said cancer cell is compared to the expression of an identical selection of genes from a different type of cancer cell.

17. The gene selection of claim 16, wherein said cancer to be identified is neuroblastoma.

18. The gene selection of claim 16, wherein said cancer to be identified is rhabdomyosarcoma.

19. The gene selection of claim 16, wherein said cancer to be identified is Burkitt's.

20. The gene selection of 16, wherein said cancer to be identified is Ewing family of tumors.

21. The gene selection of claim 16, wherein said genes are chosen from table 5.

22. The gene selection of claim 16, wherein said genes are chosen from table 2.

23. The gene selection of claim 16, wherein said genes are chosen from table 2b.

24. The gene selection of claim 16 comprising at least 9 genes chosen from table 5.

25. The gene selection of claim 24, wherein said at least 9 genes are selected from the top ranked genes.

26. The gene selection of claim 17, wherein said gene selection comprises at least one of the genes with the following Image Id.: 812105 (SEQ. ID. NO. 32), 383188 (SEQ. ID. NO. 38), 82225 (SEQ. ID. NO. 42), 878280 (SEQ. ID. NO. 33), 135688 (SEQ. ID. NO. 44), 308231 (SEQ. ID. NO. 39), 486110 (SEQ. ID. NO. 45), 377048 (SEQ. ID. NO. 40), 784257 (SEQ. ID. NO. 34), 395708 (SEQ. ID. NO. 30), 292522 (SEQ. ID. NO. 36), or 813266 (SEQ. ID. NO. 47).

27. The gene selection of claim 18, wherein said gene selection comprises at least one of the following genes with the following Image Id.: 244618 (SEQ. ID. NO. 77), 298062 (SEQ. ID. NO. 74), 324494 (SEQ. ID. NO. 62), 122159 (SEQ. ID. NO. 66), 788107 (SEQ. ID. NO. 52), 377671 (SEQ. ID. NO. 68), 784224 (SEQ. ID. NO. 71), 293500 (SEQ. ID. NO. 80), 42558 (SEQ. ID. NO. 79), 246377 (SEQ. ID. NO. 51), 809901 (SEQ. ID. NO. 67), 769959 (SEQ. ID. NO. 69), or 755750 (SEQ. ID. NO. 49).

28. The gene selection of claim 19, wherein said gene selection comprises at least one of the following genes with the following Image Id.: 609663 (SEQ. ID. NO. 99, or 868304 (SEQ. ID. NO. 86).

29. The gene selection of claim 20, wherein said gene selection comprises at least one of the following genes with the following Image Id.: 770394 (SEQ. ID. NO. 20), 866702 (SEQ. ID. NO. 16), 357031 (SEQ. ID. NO. 18), 377461 (SEQ. ID. NO. 19), 52076 (SEQ. ID. NO. 13), 1473131 (SEQ. ID. NO. 15), 208718 (SEQ. ID. NO. 2), 80338 (SEQ. ID. NO. 14), 377731 (SEQ. ID. NO. 23), 814260 (SEQ. ID. NO. 17), 364934 (SEQ. ID. NO. 12), 755599 (SEQ. ID. NO. 25), 291756 (SEQ. ID. NO. 1), 308497 (SEQ. ID. NO. 24), or combinations thereof.

30.-31. (canceled)

32. A method of targeting a product of at least one of the genes in table 5 or table 10 comprising the step of administering a therapeutic agent having a therapeutic effect on said gene product.

33. The method of claim 32, wherein said at least one gene is chosen from table 2.

34. The method of claim 32, wherein said at least one gene is chosen from table 2b.

35. The method of claim 32, wherein said gene product is chosen from the group consisting of: DNA, mRNA, proteins, and combinations thereof.

36. The method of claim 32, wherein said therapeutic agent is delivered to a cancer cell.

37. The method of claim 32, wherein said therapeutic agent is delivered in the vicinity of a cancer cell.

38. The method of claim 32, wherein said therapeutic agent is chosen from the group consisting of: vaccines, antibodies, oligonucleotide DNA antisense, RNAi, chemical molecules, proteins, inhibitors, antagonists, and combinations thereof.

39. (canceled)

40. The method of claim 32, wherein said cancer is neuroblastoma.

41. The method of claim 40, wherein said genes are selected from the group consisting of those with the following Image Id.: 812105 (SEQ. ID. NO. 32), 383188 (SEQ. ID. NO. 38), 82225 (SEQ. ID. NO. 42), 878280 (SEQ. ID. NO. 33), 135688 (SEQ. ID. NO. 44), 308231 (SEQ. ID. NO. 39), 486110 (SEQ. ID. NO. 45), 377048 (SEQ. ID. NO. 40), 784257 (SEQ. ID. NO. 34), 395708 (SEQ. ID. NO. 30), 292522 (SEQ. ID. NO. 36), 813266 (SEQ. ID. NO. 47), and combinations thereof.

42. The method of claim 40, wherein said genes are selected from table 6.

43. The method of claim 32, wherein said cancer is rhabdomyosarcoma.

44. The method of claim 43, wherein said genes are selected from the group consisting of those with the following Image Id.: 24461 8 (SEQ. ID. NO. 77), 298062 (SEQ. ID. NO. 74), 324494 (SEQ. ID. NO. 62), 122159 (SEQ. ID. NO. 66), 788107 (SEQ. ID. NO. 52), 377671 (SEQ. ID. NO. 68), 784224 (SEQ. ID. NO. 71), 293500 (SEQ. ID. NO. 80), 42558 (SEQ. ID. NO. 79), 246377 (SEQ. ID. NO. 51), 809901 (SEQ. ID. NO. 67), 769959 (SEQ. ID. NO. 69), 755750 (SEQ. ID. NO. 49), and combinations thereof.

45. The method of claim 43, wherein said genes are chosen from table 7.

46. The method of claim 32, wherein said cancer is Burkitt's.

47. The method of claim 46, wherein said genes are selected from the group consisting of those with the following Image Id.: 609663 (SEQ. ID. NO. 95), 868304 (SEQ. ID. NO. 86), and combinations thereof.

48. The method of claim 46, wherein said genes are chosen from table 8.

49. The method of claim 32, wherein said cancer is a Ewing family tumor.

50. The method of claim 49, wherein said genes are selected from the group consisting of those with the following Image Id.: 770394 (SEQ. ID. NO. 20), 866702 (SEQ. ID. NO. 16), 357031 (SEQ. ID. NO. 18), 377461 (SEQ. ID. NO. 19), 52076 (SEQ. ID. NO. 13), 1473131 (SEQ. ID. NO. 15), 208718 (SEQ. ID. NO. 2), 80338 (SEQ. ID. NO. 14), 377731 (SEQ. ID. NO. 23), 814260 (SEQ. ID. NO. 17), 64934 (SEQ. ID. NO. 12), 755599 (SEQ. ID. NO. 25), 291756 (SEQ. ID. NO. 1), 308497 (SEQ. ID. NO. 24), and combinations thereof.

51. The method of claim 49, wherein said genes are chosen from table 9.

52.-58. (canceled)

59. The method of claim 32, wherein said genes are selected from the group consisting of those with the following Clone ID: 383188 (SEQ. ID. NO. 38), 82225 (SEQ. ID. NO. 42), 811000 (SEQ. ID. NO. 6), and combinations thereof.

60. (canceled)

61. The method of claim 32, wherein said genes are selected from the group consisting of those with the following CloneID: 714453 (SEQ. ID. NO. 41), 784224 (SEQ. ID. NO. 71), 245330 (SEQ. ID. NO. 78), 2907511 (SEQ. ID. NO. 444), and combinations thereof.

62. (canceled)

63. The method of claim 32, wherein said genes are selected from the group consisting of those with the following Clone Id.: 200814 (SEQ. ID. NO. 94), 609663 (SEQ. ID. NO. 99), 714453 (SEQ. ID. NO. 83), 768370 (SEQ. ID. NO. 46), 841620 (SEQ. ID. NO. 8), 323371 (SEQ. ID. NO. 27), and combinations thereof.

64. (canceled)

65. The method of claim 32, wherein said genes are selected from the group consisting of those with the following Clone Id.: 208718 (SEQ. ID. NO. 2), 1473131 (SEQ. ID. NO. 15), 357031 (SEQ. ID. NO. 18), 755599 (SEQ. ID. NO. 25), 364934 (SEQ. ID. NO. 12), 811000 (SEQ. ID. NO. 6), and combinations thereof.

66. A method of using a selection of genes expressed in a cell having a particular type of cancer, said gene selection functioning to characterize the particular type of cancer when the expression of said gene selection from said cell is compared to the expression of an identical selection of genes from a cell without that particular type of cancer for diagnosing said particular type of cancer.

67. The method of claim 66, wherein said method utilizes at least one gene from table 5.

68. The method of claim 66, wherein said method utilizes at least one gene from table 2b.

69. The method of claim 66, wherein said cell without that particular type of cancer is a noncancerous cell.

70. The method of claim 69, wherein said method utilizes at least one gene product.

71. The method of claim 70, wherein said at least one product is chosen from the group consisting of: proteins, mRNA, DNA, and combinations thereof.

72. The method of claim 66, wherein said particular type of cancer is neuroblastoma.

73. The method of claim 72, wherein said at least one gene is chosen from table 6.

74. The method of claim 66, wherein said particular type of cancer is rhabdomyosarcoma.

75. The method of claim 74, wherein said at least one gene is chosen from table 7.

76. The method of claim 66, wherein said particular type of cancer is Burkitt's.

77. The method of claim 76, wherein said at least one gene is chosen from table 8.

78. The method of claim 66, wherein said particular type of cancer is Ewing family of tumors.

79. The method of claim 78, wherein said at least one gene is chosen from table 9.

80. A device for carrying out the method of claim 66 chosen from the group consisting of: protein arrays, cell arrays, a device to detect single polymorphisms in disease conditions, devices containing metaphase BAC genomes, cDNA arrays, and oligonucleotide arrays.

The application's sequence listing, which the Patent Office published only in electronic form, follows.

SEQUENCE LISTING (444 sequences)

SEQ ID NO: 1 - DNA, 2318 bp, Homo sapiens
cgcagggaccgtgctccgccgtctccgccgcatcttccaccctcgccgccgccgcagctccccgcgctcgtgccaccgccgccgcgtccaccctcagcgccaccgccatgcgggagatcgtgcacctgcaggccggccagtgcggcaaccagatcggggccaagttttgggaggttatcagtgacgaacatggcatcgaccccacaggcacataccatggggacagtgacctgcaactggagaggatcaacgtgtactacaacgaggccacaggaggaaattatgtccccagagcggtgctggtggacctggaacccggcaccatggactctgtccgttctggccccttcggtcagatctttcggccggacaacttcgtgtttggccaatccggagccggcaacaactgggcaaaggggcactacacggagggcgcagagctggtggacgctgtcctggacgtagtccggaaggaggccgagagctgcgactgccttcagggcttccagctgacccactcgctggggggtggcacggggtccggaatgggcacgctgctcatcagtaagatccgcgaggagttcccagaccgcatcatgaacaccttcagcgtggtgccctcgcccaaagtgtcagacacggtggtggagccctacaacgccacgctgtctgtgcaccagctggtggagaatacggatgagacctactgcatcgacaacgaggcactctacgacatctgtttccgcaccctcaagctgaccacccccacctacggggacctcaaccacctggtgtcggccaccatgagcggggtcaccacctgcctgcgcttcccgggccagctgaacgccgacctgcgcaagctggccgtcaacatggttccctttcctcgcctgcacttcttcatgcccggcttcgcacccctgaccagccggggcagccagcagtaccgggccctgacggtgcccgagctcacccagcagatgttcgatgccaagaacatgatggcggcgtgcgacccgcgccacggccgctacctgaccgtggccgccgtgttccggggccgcatgtccatgaaggaggtggacgagcagatgctgagcgtgcagagcaagaacagcagctacttcgtggagtggatccccaacaacgtgaagacggccgtgtgcgacatcccgccccgcggcctgaagatggccgcgaccttcatcggcaacagcacggccatccaggagctgttcaagcgcatctccgagcagttcacggccatgttccggcgcaaggccttcttgcactggtacacgggcgagggcatggacgagatggagttcaccgaggccgagagcaacatgaatgacctggtatctgagtaccagcagtaccaggacgccacggccgaggagggcgagttcgaggaggaggcggaggaggaggtggcctaggctgctcccatcgcttcccacctgtcccctcgaggcttctgacctttgatccgctaggccccccatctctgaaccctagagccccgctttccctccaaggctgactccccgctgaccctaacaatacctttggagctcgctttacctctggctacttcatctccgaccctggctcccctttgagccctaatttatctttaacccccttgagctcttccaaccttgacattcccaggaggagccccgcttcaccccttctgactctggaaaccgcacctttaactttgcagaccttccttcacccctgacttctgcttcacctttgacctctgccccccatgaatcccattttacctctagacctataagttctggtttatgtttgacccctccctctgagctgcacttcaccgctgaccttgcctcacctttaaccccccacctgagccccagctcctacctctgaccccaacttctctttgatctctgaatcccctctgactccaacttctctttcaccctctatgagtcccattttacttctacacctgcaagtcctggtttatattggacccctccctccgagctgcagttcacctttgaccttgcctcacctttcaccccccaccccccacagcgtcagctcctacctctgaccccagcttctctctgattcccacaggccccatgcatcctccctgcctcactcccctcagcccctgccgaccttagcttatctgggagagaaacaaggcctggtgcctgtgaggaagagaggtcacccctaccctccctccccgcttccctgcctcaccctcaataaataaattaattgttgtcatggaaaaaaaaaaaaaaaaaaaaaaaaaaaaaaaa

SEQ ID NO: 2 - DNA, 1399 bp, Homo sapiens
agtgtgaaatcttcagagaagaatttctctttagttctttgcaagaaggtagagataaagacactttttcaaaaatggcaatggtatcagaattcctcaagcaggcctggtttattgaaaatgaagagcaggaatatgttcaaactgtgaagtcatccaaaggtggtcccggatcagcggtgagcccctatcctaccttcaatccatcctcggatgtcgctgccttgcataaggccataatggttaaaggtgtggatgaagcaaccatcattgacattctaactaagcgaaacaatgcacagcgtcaacagatcaaagcagcatatctccaggaaacaggaaagcccctggatgaaacacttaagaaagcccttacaggtcaccttgaggaggttgttttagctctgctaaaaactccagcgcaatttgatgctgatgaacttcgtgctgccatgaagggccttggaactgatgaagatactctaattgagattttggcatcaagaactaacaaagaaatcagagacattaacagggtctacagagaggaactgaagagagatctggccaaagacataacctcagacacatctggagattttcggaacgctttgctttctcttgctaagggtgaccgatctgaggactttggtgtgaatgaagacttggctgattcagatgccagggccttgtatgaagcaggagaaaggagaaaggggacagacgtaaacgtgttcaataccatccttaccaccagaagctatccacaacttcgcagagtgtttcagaaatacaccaagtacagtaagcatgacatgaacaaagttctggacctggagttgaaaggtgacattgagaaatgcctcacagctatcgtgaagtgcgccacaagcaaaccagctttctttgcagagaagcttcatcaagccatgaaaggtgttggaactcgccataaggcattgatcaggattatggtttcccgttctgaaattgacatgaatgatatcaaagcattctatcagaagatgtatggtatctccctttgccaagccatcctggatgaaaccaaaggagattatgagaaaatcctggtggctctttgtggaggaaactaaacattcccttgatggtctcaagctatgatcagaagactttaattatatattttcatcctataagcttaaataggaaagtttcttcaacaggattacagtgtagctacctacatgctgaaaaatatagcctttaaatcatttttatattataactctgtataatagagataagtccattttttaaaaatgttttccccaaaccataaaaccctatacaagttgttctagtaacaatacatgagaaagatgtctatgtagctgaaaataaaatgacgtcacaagac

SEQ ID NO: 3 - DNA, 1432 bp, Homo sapiens
gctgttcggcctgcgtcgctccgggagctgccgacggacggagcgcccccgcccccgcccggccgcccgcccgccgccgccatgcccttctccaacagccacaacgcactgaagctgcgcttcccggccgaggacgagttccccgacctgagcgcccacaacaaccacatggccaaggtgctgacccccgagctgtacgcggagctgcgcgccaagagcacgccgagcggcttcacgctggacgacgtcatccagacaggcgtggacaacccgggccacccgtacatcatgaccgtgggctgcgtggcgggcgacgaggagtcctacgaagtgttcaaggatctcttcgaccccatcatcgaggaccggcacggcggctacaagcccagcgatgagcacaagaccgacctcaaccccgacaacctgcagggcggcgacgacctggaccccaactacgtgctgagctcgcgggtgcgcacgggccgcagcatccgtggcttctgcctccccccgcactgcagccgcggggagcgccgcgccatcgagaagctcgcggtggaagccctgtccagcctggacggcgacctggcgggccgatactacgcgctcaagagcatgacggaggcggagcagcagcagctcatcgacgaccacttcctcttcgacaagcccgtgtcgcccctgctgctggcctcgggcatggcccgcgactggcccgacgcccgcggtatctggcacaatgacaataagaccttcctggtgtgggtcaacgaggaggaccacctgcgggtcatctccatgcagaaggggggcaacatgaaggaggtgttcacccgcttctgcaccggcctcacccagattgaaactctcttcaagtctaaggactatgagttcatgtggaaccctcacctgggctacatcctcacctgcccatccaacctgggcaccgggctgcgggcaggtgtgcatatcaagctgcccaacctgggcaagcatgagaagttctcggaggtgcttaagcggctgcgacttcagaagcgaggcacaggcggtgtggacacggctgcggtgggcggggtcttcgacgtctccaacgctgaccgcctgggcttctcagaggtggagctggtgcagatggtggtggacggagtgaagctgctcatcgagatggagcagcggctggagcagggccaggccatcgacgacctcatgcctgcccagaaatgaagcccggcccacacccgacaccagccctgctgcttcctaacttattgcctgggcagtgcccaccatgcacccctgatgttcgccgtctggcgagcccttagccttgctgtagagacttccgtcacccttggtagagtttatttttttgatggctaagatactgctgatgctgaaataaactagggttttggcctgcctgcgtctg

SEQ ID NO: 4 - DNA, 2384 bp, Homo sapiens
gagctcctgtcaccgctggggccgggccgggcgggagtgcaggggacgtgagggcgcaagggccgggacatggggcccgccagccccgctgctcgcggtctaagtcgccgcccgggccagccgccgctgccgctgctgctgccactattgctgctgcttctgcgcgcgcagcccgccatcgggagcctggccggtgggagccccggcgcggccgaggccccggggtcggcccaggtggctggactatgcgggcgcctaacccttcaccgggacctgcgcaccggccgctgggaaccagacccacagcgctctcgacgctgtctccgggacccgcagcgcgtgctggagtactgcagacagatgtacccggagctgcagattgcacgtgtggagcaggctacgcaggccatccccatggagcgctggtgcgggggttcccggagcggcagctgcgcccacccccaccaccaggttgtgcccttccgctgcctgcctggtgaatttgtgagtgaggccctgctggtgcctgaaggctgccggttcttgcaccaggagcgcatggaccaatgtgagagttcaacccggaggcatcaggaggcacaggaggcctgcagctcccagggcctcatcctgcacggctcgggcatgctcttaccctgtggctcggatcggttccgtggtgtggagtatgtgtgctgtccccctccagggacccccgacccatctgggacagcagttggtgacccctccacccggtcctggcccccggggagcagagtagagggggctgaggacgaggaagaggaggaatccttcccacagccagtagatgattacttcgtggagcctccgcaggctgaagaggaagaggaaacggtcccacccccaagctcccatacacttgcagtggtcggcaaagtcactcccaccccgaggcccacagacggtgtggatatttactttggcatgcctggggaaatcagtgagcacgaggggttcctgagggccaagatggacctggaggagcgtaggatgcgccagattaatgaggtgatgcgtgaatgggccatggcagacaaccagtccaagaacctgcctaaagccgacagacaggccctgaatgagcacttccagtccattctgcagactctggaggagcaggtgtctggtgagcgacagcgcctggtggaaacccacgccacccgcgtcatcgcccttatcaacgaccagcgccgggctgccttggagggcttcctggcagccctgcaggcagatccgcctcaggcggagcgtgtcctgttggccctgcggcgctacctgcgtgcggagcagaaggaacagaggcacacgctgcgccactaccagcatgtggccgccgtggatcccgagaaggcacagcagatgcgcttccaggtgcatacccaccttcaagtgattgaggagagggtgaatcagagcctgggcctgcttgaccagaacccccacctggctcaggagctgcggccccaaatccaggaactcctccactctgaacacctgggtcccagtgaattggaagcccctgcccctgggggcagcagcgaggacaagggtgggctgcagcctccagattccaaggatgacacccccatgacccttccaaaagggtccacagaacaagatgctgcatcccctgagaaagagaagatgaacccgctggaacagtatgagcgaaaggtgaatgcgtctgttccaaggggtttccctttccactcatcggagattcagagggatgagctggcaccagctgggacaggggtgtcccgtgaggctgtgtcgggtctgctgatcatgggagcgggcggaggctccctcatcgtcctctccatgctgctcctgcgcaggaagaagccctacggggctatcagccatggcgtggtggaggtggaccccatgctgaccctggaggagcagcagctccgcgaactgcagcggcacggctatgagaaccccacttaccgcttcctggaggaacgaccctgacccggcccccttcaccccttcagccgagcccagacctcccctcttcctggagccccagaaccccaactcccagcctagggcagcagggagtcttgaagtgatcatttcacacccttttgtgagacggctggaaattcttatttcccctttccaattccaaaattccatccctaagaattcccagatagtcccagcagcctccccacgtggcacctcctcaccttaatttattttttaagtttatttatggctctttaaggtgaccgccaccttggtcctagtgtctattccctggaattcaccctctcatgtttccctactaacatcccaataaagtcctcttccctaaaaaaaaaaaaaaa

SEQ ID NO: 5 - DNA, 1325 bp, Homo sapiens
gcagtagcagcgagcagcagagtccgcacgctccggcgaggggcagaagagcgcgagggagcgcggggcagcagaagcgagagccgagcgcggacccagccaggacccacagccctccccagctgcccaggaagagccccagccatggaacaccagctcctgtgctgcgaagtggaaaccatccgccgcgcgtaccccgatgccaacctcctcaacgaccgggtgctgcgggccatgctgaaggcggaggagacctgcgcgccctcggtgtcctacttcaaatgtgtgcagaaggaggtcctgccgtccatgcggaagatcgtcgccacctggatgctggaggtctgcgaggaacagaagtgcgaggaggaggtcttcccgctggccatgaactacctggaccgcttcctgtcgctggagcccgtgaaaaagagccgcctgcagctgctgggggccacttgcatgttcgtggcctctaagatgaaggagaccatccccctgacggccgagaagctgtgcatctacaccgacggctccatccggcccgaggagctgctgcaaatggagctgctcctggtgaacaagctcaagtggaacctggccgcaatgaccccgcacgatttcattgaacacttcctctccaaaatgccagaggcggaggagaacaaacagatcatccgcaaacacgcgcagaccttcgttgcctcttgtgccacagatgtgaagttcatttccaatccgccctccatggtggcagcggggagcgtggtggccgcagtgcaaggcctgaacctgaggagccccaacaacttcctgtcctactaccgcctcacacgcttcctctccagagtgatcaagtgtgacccagactgcctccgggcctgccaggagcagatcgaagccctgctggagtcaagcctgcgccaggcccagcagaacatggaccccaaggccgccgaggaggaggaagaggaggaggaggaggtggacctggcttgcacacccaccgacgtgcgggacgtggacatctgaggggcccaggcaggcgggcgccaccgccacccgcagcgagggcggagccggccccaggtgctccacatgacagtccctcctctccggagcattttgataccagaagggaaagcttcattctccttgttgttggttgttttttcctttgctctttcccccttccatctctgacttaagcaaaagaaaaagattacccaaaaactgtctttaaaagagagagagagaaaaaaaaaaaaaaaaaaaaaaaaaaaaaaaaaaaaaaaaaaaaaaaaaaaaaaaaaaaaaaaaaaaaa

SEQ ID NO: 6 - DNA, 2254 bp, Homo sapiens
aatcgaaagtagactcttttctgaagcatttcctgggatcagcctgaccacgctccatactgggagaggcttctgggtcaaaggaccagtctgcagagggatcctgtggctggaagcgaggaggctccacacggccgttgcagctaccgcagccaggatctgggcatccaggcacggccatgacccctccgaggctcttctgggtgtggctgctggttgcaggaacccaaggcgtgaacgatggtgacatgcggctggccgatgggggcgccaccaaccagggccgcgtggagatcttctacagaggccagtggggcactgtgtgtgacaacctgtgggacctgactgatgccagcgtcgtctgccgggccctgggcttcgagaacgccacccaggctctgggcagagctgccttcgggcaaggatcaggccccatcatgctggacgaggtccagtgcacgggaaccgaggcctcactggccgactgcaagtccctgggctggctgaagagcaactgcaggcacgagagagacgctggtgtggtctgcaccaatgaaaccaggagcacccacaccctggacctctccagggagctctcggaggcccttggccagatctttgacagccagcggggctgcgacctgtccatcagcgtgaatgtgcagggcgaggacgccctgggcttctgtggccacacggtcatcctgactgccaacctggaggcccaggccctgtggaaggagccgggcagcaatgtcaccatgagtgtggatgctgagtgtgtgcccatggtcagggaccttctcaggtacttctactcccgaaggattgacatcaccctgtcgtcagtcaagtgcttccacaagctggcctctgcctatggggccaggcagctgcagggctactgcgcaagcctctttgccatcctcctcccccaggacccctcgttccagatgcccctggacctgtatgcctatgcagtggccacaggggacgccctgctggagaagctctgcctacagttcctggcctggaacttcgaggccttgacgcaggccgaggcctggcccagtgtccccacagacctgctccaactgctgctgcccaggagcgacctggcggtgcccagcgagctggccctactgaaggccgtggacacctggagctggggggagcgtgcctcccatgaggaggtggagggcttggtggagaagatccgcttccccatgatgctccctgaggagctctttgagctgcagttcaacctgtccctgtactggagccacgaggccctgttccagaagaagactctgcaggccctggaattccacactgtgcccttccagttgctggcccggtacaaaggcctgaacctcaccgaggatacctacaagccccggatttacacctcgcccacctggagtgcctttgtgacagacagttcctggagtgcacggaagtcacaactggtctatcagtccagacgggggcctttggtcaaatattcttctgattacttccaagccccctctgactacagatactacccctaccagtccttccagactccacaacaccccagcttcctcttccaggacaagagggtgtcctggtccctggtctacctccccaccatccagagctgctggaactacggcttctcctgctcctcggacgagctccctgtcctgggcctcaccaagtctggcggctcagatcgcaccattgcctacgaaaacaaagccctgatgctctgcgaagggctcttcgtggcagacgtcaccgatttcgagggctggaaggctgcgattcccagtgccctggacaccaacagctcgaagagcacctcctccttcccctgcccggcagggcacttcaacggcttccgcacggtcatccgccccttctacctgaccaactcctcaggtgtggactagacgcgtggccaagggtggtgagaaccggagaaccccaggacgccctcactgcaggctcccctcctcggcttccttcctctctgcaatgaccttcaacaaccggccaccagatgtcgccctactcacctgaggctcagcttcaagaaattactggaaggcttccactagggtccaccaggagttctcccaccacctcaccagtttccaggtggtaagcaccaggaggccctcgaggttgctctggatccccccacagcccctggtcagtctgcccttgtcactggtctgaggtcattaaaattacattgaggttccta

SEQ ID NO: 7 - DNA, 4213 bp, Homo sapiens
tccactcctggagcccgcggaccccgagcacgcgcctgacagcccctgctggcccggcgcgcggcgtcgccaggccagctatggcccccgacccggtggccgccgagaccgcggctcagggacctaccccgcgctacttcacctgggacgaggtggcccagcgctcagggtgcgaggagcggtggctagtgatcgaccgtaaggtgtacaacatcagcgagttcacccgccggcatccagggggctcccgggtcatcagccactacgccgggcaggatgccacggatccctttgtggccttccacatcaacaagggccttgtgaagaagtatatgaactctctcctgattggagaactgtctccagagcagcccagctttgagcccaccaagaataaagagctgacagatgagttccgggagctgcgggccacagtggagcggatggggctcatgaaggccaaccatgtcttcttcctgctgtacctgctgcacatcttgctgctggatggtgcagcctggctcaccctttgggtctttgggacgtcctttttgcccttcctcctctgtgcggtgctgctcagtgcagttcaggcccaggctggctggctgcagcatgactttgggcacctgtcggtcttcagcacctcaaagtggaaccatctgctacatcattttgtgattggccacctgaagggggcccccgccagttggtggaaccacatgcacttccagcaccatgccaagcccaactgcttccgcaaagacccagacatcaacatgcatcccttcttctttgccttggggaagatcctctctgtggagcttgggaaacagaagaaaaaatatatgccgtacaaccaccagcacaaatacttcttcctaattgggcccccagccttgctgcctctctacttccagtggtatattttctattttgttatccagcgaaagaagtgggtggacttggcctggatgattaccttctacgtccgcttcttcctcacttatgtgccactattggggctgaaagccttcctgggccttttcttcatagtcaggttcctggaaagcaactggtttgtgtgggtgacacagatgaaccatattcccatgcacattgatcatgaccggaacatggactgggtttccacccagctccaggccacatgcaatgtccacaagtctgccttcaatgactggttcagtggacacctcaacttccagattgagcaccatctttttcccacgatgcctcgacacaattaccacaaagtggctcccctggtgcagtccttgtgtgccaagcatggcatagagtaccagtccaagcccctgctgtcagccttcgccgacatcatccactcactaaaggagtcagggcagctctggctagatgcctatcttcaccaataacaacagccaccctgcccagtctggaagaagaggaggaagactctggagccaaggcagaggggagcttgagggacaatgccactatagtttaatactcagagggggttgggtttggggacataaagcctctgactcaaactcctcccttttatcttctagccacagttctaagacccaaagtggggggtggacacagaagtccctaggagggaaggagctgttggggcaggggtgtaaattatttcctttttctagtttggcacatgcaggtagttggtgaacagagagaaccaggagggtaacagaagaggagggacctactgaacccagagtcaggaagagatttaacactaaaattccactcatgccgggcgtggtggcacgcgcctgtaatcccagctacccaggaggctgaggcaggagaatcgcttgaaccggggaggtggaggttgcagtgagctgagatcacgccattgtactccagcctgggcgacagagcaagactccatttcaaaaaaaaaaaaaaaatccactcatataaaaggtgagctcagctcactggtccatttctcagtggcttctccatcctcatttgcaaacctcagagggataaggcagttgaacctgatgagcaagaattataacagcaaggaaacattaatgcttagaattctgagatccagcacaactcagtctgtgggagctcagctcgctgcccagggataggtatgacctatgtctgccttaggctgctgggagatgccattctccagtttcagaagcaggcagggcaaaggtcaagactgtggtattggggtcttttggctctgaaggatcctggaaccactgattttggtttattccctccagggtctaaagagaacaagaggtgctagctcttaccaaaacagatggtagagagagttgctggctatttaaaaagctctttcatcttttaattcacctcttcttttcacctctttaaccactcctcaggaacagaacacttctaggactgggggtcttttagctccataagcaagtgagcagatgggacaagttagtcttttctccctagaaacaaaggggatgcccagtggtttccctttgcttcccaacctaaaatttcaagtttaataaaatagcaattagcagaagtgaccaaattgggagataattatcagtcatgaggaaagacacagatttcggtcataaagaatgtaagggctataagtagaaactttctataacctaaatgatgttatagaattatttttgagcaggagcagaaagattaaatatgatcacttcatacttctaaatcagaaataggaagattaaaaccacagaacagtttgtgatttctattgctgtagctaggtatcttactctgtccactcttgttcaagtatctaactcttctggaaaccaaataggctttagaagagattatcctatattcctatcagtataatactaaaatgtaactttttaatcatctggtttttaaaagataaacagtttagcccatctctccagagagcaaacataggaatatgactcaggagcctcctagggcttatcatcagccctcacacccgcttccccctccaacccacagcctttgcttccaggtggcaggattactactttgcctcttcagcagcatctactctaggcatattgatcattttagacactgggagaagagaacctcaaactaggaggaaaagacagagcctccacttagttttgggaggggatggcagacagtcaaggagatgagcgtcctaaggcatgttgggatagggtcagatgcaccacccatggagaggtttgtcaacacaaagacatggaaggttagaggtttgtcaacaaaaagacatggaaggttaggtttgtcaacacaaagacatggaagattagaggtttgtcaacacaaagacacaggaagaatgggctgcagaagatttagatgttttccatttgggcacattttacttagctggagaactaggtttaaaacagcctgggtaggaaaattagaagcaagctggatgcagtggctcatgcctgtaatcccaacacttttgggaggtccaggcaggaggatcacttgggcccaggaggtcaagcctgcagcgagctgagatcacaccactgcactccagcctggggtgatagaacaagaccctgtctcaaaaaaaaaaaaaaacaacaaaaacttagaattgaggagttgtacctccattggcttcctcactccaaaataggtgctgatccttcctattcctattctttgccaccttttgggtgtggtgtcaccagcctgtttagccaagtagctttgggcataggctgcccaatctgagcaaacaccagtgaggctctattgagccaagaccaagtcctcaaagcacctgaaccactgtggccttctcagcctacagcagtgtggtctcttacatggccacaaagggacacacagtgacaaaaggctcggaatgttacaatggtaaaatgagtgatctcaaatccactgacagatataaaataggcttagagaggaaaagctgcctctggtcaagtagatcatggcagcatgaattccaactcacttttttacaactccaacttctatgtttatctttgttactttcacttttttacaacctggccagaggcattttttaaatcaggcccaatatcagtattctttttgtgtgtgccaattttgttatcacatccctatgaagttgaaaaataaagttaattttgaccaaaaaaaaaaaaaaaag

SEQ ID NO: 8 - DNA, 4459 bp, Homo sapiens
gtttctctctctccttctctctctctctctctctctcttttttttccgccctagctggggctgtgttggaggagaggaagaaagagagacagaggattgcattcatccgttacgttcttgaaatttcctaatagcaagaccagcgaagcggttgcacccttttcaatcttgcaaaggaaaaaaacaaaacaaaacaaaaaaaacccaagtccccttcccggcagtttttgccttaaagctgccctcttgaaattaattttttcccaggagagagatgtcttatcaggggaagaaaaatattccacgcatcacgagcgatcgtcttctgatcaaaggaggtaaaattgttaatgatgaccagtcgttctatgcagacatatacatggaagatgggttgatcaagcaaataggagaaaatctgattgtgccaggaggagtgaagaccatcgaggcccactcccggatggtgatccccggaggaattgacgtccacactcgtttccagatgcctgatcagggaatgacgtctgctgatgatttcttccaaggaaccaaggcggccctggctgggggaaccactatgatcattgaccacgttgttcctgagcctgggacaagcctgctcgctgcctttgaccagtggagggaatgggccgacagcaagtcctgctgtgactactctctgcatgtggacatcagcgagtggcataagggcatccaggaggagatggaagcgcttgtgaaggatcacggggtaaattccttcctcgtgtacatggctttcaaagatcgcttccagctaacggattgccagatttatgaagtactgagtgtgatccgggatattggcgccatagcccaagtccacgcagaaaatggcgacatcattgcagaggagcagcagaggatcctggatctgggcatcacgggccccgagggacatgtgctgagccgacctgaggaggtcgaggccgaagccgtgaatcgtgccatcaccatcgccaaccagaccaactgcccgctgtatatcaccaaggtgatgagcaaaagctctgctgaggtcatcgcccaggcacggaagaagggaactgtggtgtatggcgagcccatcactgccagcttgggaacggacggctcccattactggagcaagaactgggccaaggctgctgcctttgtcacctccccacccttgagccctgatccaaccactccagactttctcaactccttgctgtcctgtggagacctccaggtcacgggcagtgcccattgcacgtttaacactgcccagaaggctgtaggaaaggacaacttcaccctgattccggagggcaccaatggcactgaggagcggatgtccgtcatctgggacaaggctgtggtcactgggaagatggatgagaaccagtttgtggctgtgaccagcaccaatgcagccaaagtcttcaacctttacccccggaaaggccgcattgctgtgggatccgatgccgacctggtcatctgggaccccgacagcgttaaaaccatctctgccaagacacacaacagctctctcgagtacaacatctttgaaggcatggagtgccgcggctccccactggtggtcatcagccaggggaagattgtcctggaggacggcaccctgcatgtcaccgaaggctctggacgctacattccccggaagcccttccctgattttgtttacaagcgtatcaaggcaaggagcaggctggctgagctgagaggggttcctcgtggcctgtatgacggacctgtgtgtgaagtgtctgtgacgcccaagacagtcactccagcctcctcggccaagacgtctcctgccaagcagcaggccccacctgtccggaacctgcaccagtctggattcagtttgtctggtgctcagattgatgacaacattccccgccgcaccacccagcgtatcgtggcgccccccggtggccgtgccaacatcaccagcctgggctagagctcctgggctgtgcgtccactggggactggggatgggacacctgaggacattctgagacttctttcttccttcctttttttttttttgtttttttttttaagagcctgtgatagttactgtggagcagccagttcatggggtcccccttggggccccacaccccgtctctcaccaagagttactgattttgctcatccacttccctacacatctatgggtatcacacccaagactacccaccaagctcatacagggaaccacacccaacacttagacatgcgaacaagcagcccccagcgagggtctccttcgccttcaacctcctagtgtctgttagcatcttccttttcatggggggagggaagataaagtgaattgcccagagctgcctttttcttttctttttaaaaattttaagaagttttccttgtggggctggggaggggccggggtcagggagagtctttttttttttttttttaaatactaaattggaacatttaattccatattaatacaaggggtttgaactggacatcctaatgatgcaattacgtcatcacccagctgattccgggtggttggcaaactcatcgtgtctgtcctgagaggctccacaatgcccacccgcatcgccattctgtagtcttcagggtcagctgttgataaaggggcaggcttgcgttattggcctagattttgctgcagattaaatcctttgaggattctcttctcttttaccatttttctgcgtgctctcactctctctttctctctctagctttttaattcatgaatattttcgtgtctgtctctctctctctctgtgtttcctccagcccttgtctcggagacggtgttttcctcccttgccccattatcttttcacctcccaggtctaccatttcatggtggtcgttgggtccgcctaaaggatttgagcgtttgccattgcaagcatagtgctgtgtcatcctggtccatgtaggactggtgctaaccacctgccatcatgaggatgtgtgctagagtgtgggaccctggccaagtgcaggaatgggccatgccgtctcacccacagtatcacacgtggaaccgcagacagggcccagaagctttagaggtatgaggctgcagaaccggagagattttcctctgtgcagtgctctctggctaaagtcacggtcaaacctaaacaccgagcctcattaacccaagtgaaccaaccaaagtcaccagttcagaagtgctaagctaataggagtctgacccgagggcctgctgcttcctggttaagtatcttttgagattctagaacacatgggagctttttattttcggggaaaaaccgtatttttttcttgtccaattatttctaaagacacactacatagaaagaggccctataaactcaaaaagtcattgggaaacttaaagtctattctactttgcaagaggagaaatgtgttttatgaacgatagatcacatcagaactcctgtggggaggaaaccttataaattaaacacatggcccccttagagaccacaggtgatgtctgtctccatccttccctctccttttctgtcacctttccccctagctggctcctttggacctacccctgtccttgctgacttgtgttgcattgtattccaaacgtgtttacaggttctcttaagcaatgttgtatttgcaggcttttctgaataccaaatctgctttttgtaaagcgtaaaaacatcacaaagtaggtcattccatcaccacccttgtctctctacacattttgcctttggggatctggttggggttttgggttttttgttgttgttgtttatttgttattttaaaggtaaattgcacttttaaaaaaataattggttgacttaatatatttgctttttttctcacctgcacttagaggaaatttgaacaagttggaaaaaaacaatttttgtttcaattctaagaaacacttgcagctctagtattcacttgagtcttcctgtttttcctgtaccgggtcatggtaatttttggttgttttggttgttttcttaaaaaacaagttaaaacctgacgatttctgcaggctgtgtaagcatgtttacctgttggcttgctttgtgtgtctgttaaatgaatgtcatatgtaaatgctaaaataaatcgacagtgtctcagaactgaataactgcagtgacttgatgctctaaaacagtgtaggatttaagaatagatggtttttaatcctggaaattgtgattgtgacccatgagtggaggaactttcagttctaaagctgataaagtgtgtagccagaagagtacttttttttttgtaaccactgtcttgatggcaaaataattatggtaaaaaacaagtctcgtgtttattattccttaagaactctgtgttatattaccatggaacgcctaataaagcaaaatgtggttgtttc

SEQ ID NO: 9 - DNA, 7718 bp, Homo sapiens
cgggagcggcgggagcggtggcggcggcagaggcggcggctccagcttcggctccggctcgggctcgggctccggctccggctccggctccggctccagctcgggtggcggtggcgggagcgggaccaggtggaggcggcggcggcagaggagtgggagcagcggccctagcggcttgcggggggacatgcggaccgacggcccctggataggcggaaggagtggaggccctggtgcccggcccttggtgctgagtatccagcaagagtgaccggggtgaagaagcaaagactcggttgattgtcctgggctgtggctggctgtggagctagagccctggatggcccctgagccagccccagggaggacgatggtgccccttgtgcctgcactggtgatgcttggtttggtggcaggcgcccatggtgacagcaaacctgtcttcattaaagtccctgaggaccagactgggctgtcaggaggggtagcctccttcgtgtgccaagctacaggagaacccaagccgcgcatcacatggatgaagaaggggaagaaagtcagctcccagcgcttcgaggtcattgagtttgatgatggggcagggtcagtgcttcggatccagccattgcgggtgcagcgagatgaagccatctatgagtgtacagctactaacagcctgggtgagatcaacactagtgccaagctctcagtgctcgaagaggaacagctgccccctgggttcccttccatcgacatggggcctcagctgaaggtggtggagaaggcacgcacagccaccatgctatgtgccgcaggcggaaatccagaccctgagatttcttggttcaaggacttccttcctgtagaccctgccacgagcaacggccgcatcaagcagctgcgttcaggtgccttgcagatagagagcagtgaggaatccgaccaaggcaagtacgagtgtgtggcgaccaactcggcaggcacacgttactcagcccctgcgaacctgtatgtgcgagtgcgccgcgtggctcctcgtttctccatccctcccagcagccaggaggtgatgccaggcggcagcgtgaacctgacatgcgtggcagtgggtgcacccatgccctacgtgaagtggatgatgggggccgaggagctcaccaaggaggatgagatgccagttggccgcaacgtcctggagctcagcaatgtcgtacgctctgccaactacacctgtgtggccatctcctcgctgggcatgatcgaggccacagcccaggtcacagtgaaagctcttccaaagcctccgattgatcttgtggtgacagagacaactgccaccagtgtcaccctcacctgggactctgggaactcggagcctgtaacctactatggcatccagtaccgcgcagcgggcacggagggcccctttcaggaggtggatggtgtggccaccacccgctacagcattggcggcctcagccctttctcggaatatgccttccgcgtgctggcggtgaacagcatcgggcgagggccgcccagcgaggcagtgcgggcacgcacgggagaacaggcgccctccagcccaccgcgccgcgtgcaggcacgcatgctgagcgccagcaccatgctggtgcagtgggagcctcccgaggagcccaacggcctggtgcggggataccgcgtctactatactccggactcccgccgccccccgaacgcctggcacaagcacaacaccgacgcggggctcctcacgaccgtgggcagcctgctgcctggcatcacctacagcctgcgcgtgcttgccttcaccgccgtgggcgatggccctcccagccccaccatccaggtcaagacgcagcagggagtgcctgcccagcccgcggacttccaggccgaggtggagtcggacaccaggatccagctctcgtggctgctgccccctcaggagcggatcatcatgtatgaactggtgtactgggcggcagaggacgaagaccaacagcacaaggtcaccttcgacccaacctcctcctacacactagaggacctgaagcctgacacactctaccgcttccagctggctgcacgctcggatatgggggtgggcgtcttcacccccaccattgaggcccgcacagcccagtccaccccctccgcccctccccagaaggtgatgtgtgtgagcatgggctccaccacggtccgggtaagttgggtcccgccgcctgccgacagccgcaacggcgttatcacccagtactccgtggcccacgaggcggtggacggcgaggaccgcgggcggcatgtggtggatggcatcagccgtgagcactccagctgggacctggtgggcctggagaagtggacggagtaccgggtgtgggtgcgggcacacacagacgtgggccccggccccgagagcagcccggtgctggtgcgcaccgatgaggacgtgcccagcgggcctccgcggaaggtggaggtggagccactgaactccactgctgtgcatgtctactggaagctgcctgtccccagcaagcagcatggccagatccgcggctaccaggtcacctacgtgcggctggagaatggcgagccccgtggactccccatcatccaagacgtcatgctagccgaggcccagtggcggccagaggagtccgaggactatgaaaccactatcagcggcctgaccccggagaccacctactccgttactgttgctgcctataccaccaagggggatggtgcccgcagcaagcccaaaattgtcactacaacaggtgcagtcccaggccggcccaccatgatgatcagcaccacggccatgaacactgcgctgctccagtggcacccacccaaggaactgcctggcgagctgctgggctaccggctgcagtactgccgggccgacgaggcgcggcccaacaccatagatttcggcaaggatgaccagcacttcacagtcaccggcctgcacaaggggaccacctacatcttccggcttgctgccaagaaccgggctggcttgggtgaggagttcgagaaggagatcaggacccccgaggacctgcccagcggcttcccccaaaacctgcatgtgacaggactgaccacgtctaccacagaactggcctgggacccgccagtgctggcggagaggaacgggcgcatcatcagctacaccgtggtgttccgagacatcaacagccaacaggagctgcagaacatcacgacagacacccgctttacccttactggcctcaagccagacaccacttacgacatcaaggtccgcgcatggaccagcaaaggctctggcccactcagccccagcatccagtcccggaccatgccggtggagcaagtgtttgccaagaacttccgggtggcggctgcaatgaagacgtctgtgctgctcagctgggaggttcccgactcctataagtcagctgtgccctttaagattctgtacaatgggcagagtgtggaggtggacgggcactcgatgcggaagctgatcgcagacctgcagcccaacacagagtactcgtttgtgctgatgaaccgtggcagcagcgcagggggcctgcagcacctggtgtccatccgcacagcccccgacctcctgcctcacaagccgctgcctgcctctgcctacatagaggacggccgcttcgatctctccatgccccatgtgcaagacccctcgcttgtcaggtggttctacattgttgtggtacccattgaccgtgtgggcgggagcatgctgacgccaaggtggagcacacccgaggaactggagctggacgagcttctagaagccatcgagcaaggcggagaggagcagcggcggcggcggcggcaggcagaacgtctgaagccatatgtggctgctcaactggatgtgctcccggagacctttaccttgggggacaagaagaactaccggggcttctacaaccggcccctgtctccggacttgagctaccagtgctttgtgcttgcctccttgaaggaacccatggaccagaagcgctatgcctccagcccctactcggatgagatcgtggtccaggtgacaccagcccagcagcaggaggagccggagatgctgtgggtgacgggtcccgtgctggcagtcatcctcatcatcctcattgtcatcgccatcctcttgttcaaaaggaaaaggacccactctccgtcctctaaggatgagcagtcgatcggactgaaggactccttgctggcccactcctctgaccctgtggagatgcggaggctcaactaccagaccccaggtatgcgagaccacccacccatccccatcaccgacctggcggacaacatcgagcgcctcaaagccaacgatggcctcaagttctcccaggagtatgagtccatcgaccctggacagcagttcacgtgggagaattcaaacctggaggtgaacaagcccaagaaccgctatgcgaatgtcatcgcctacgaccactctcgagtcatccttacctctatcgatggcgtccccgggagtgactacatcaatgccaactacatcgatggctaccgcaagcagaatgcctacatcgccacgcagggccccctgcccgagaccatgggcgatttctggagaatggtgtgggaacagcgcacggccactgtggtcatgatgacacggctggaggagaagtcccgggtaaaatgtgatcagtactggccagcccgtggcaccgagacctgtggccttattcaggtgaccctgttggacacagtggagctggccacatacactgtgcgcaccttcgcactccacaagagtggctccagtgagaagcgtgagctgcgtcagtttcagttcatggcctggccagaccatggagttcctgagtacccaactcccatcctggccttcctacgacgggtcaaggcctgcaaccccctagacgcagggcccatggtggtgcactgcagcgcgggcgtgggccgcaccggctgcttcatcgtgattgatgccatgttggagcggatgaagcacgagaagacggtggacatctatggccacgtgacctgcatgcgatcacagaggaactacatggtgcagacggaggaccagtacgtgttcatccatgaggcgctgctggaggctgccacgtgcggccacacagaggtgcctgcccgcaacctgtatgcccacatccagaagctgggccaagtgcctccaggggagagtgtgaccgccatggagctcgagttcaagttgctggccagctccaaggcccacacgtcccgcttcatcagcgccaacctgccctgcaacaagttcaagaaccggctggtgaacatcatgccctacgaattgacccgtgtgtgtctgcagcccatccgtggtgtggagggctctgactacatcaatgccagcttcctggatggttatagacagcagaaggcctacatagctacacaggggcctctggcagagagcaccgaggacttctggcgcatgctatgggagcacaattccaccatcatcgtcatgctgaccaagcttcgggagatgggcagggagaaatgccaccagtactggccagcagagcgctctgctcgctaccagtactttgttgttgacccgatggctgagtacaacatgccccagtatatcctgcgtgagttcaaggtcacggatgcccgggatgggcagtcaaggacaatccggcagttccagttcacagactggccagagcagggcgtgcccaagacaggcgagggattcattgacttcatcgggcaggtgcataagaccaaggagcagtttggacaggatgggcctatcacggtgcactgcagtgctggcgtgggccgcaccggggtgttcatcactctgagcatcgtcctggagcgcatgcgctatgagggcgtggtcgacatgtttcagaccgtgaagaccctgcgtacacagcgtcctgccatggtgcagacagaggaccagtatcagctgtgctaccgtgcggccctggagtacctcggcagctttgaccactatgcaacgtaactaccgctcccctctcctccgccacccccgccgtggggctccggaggggacccagctcctctgagccataccgaccatcgtccagccctcctacgcagatgctgtcactggcagagcacagcccacggggatcacagcgtttcaggaacgttgccacaccaatcagagagcctagaacatccctgggcaagtggatggcccagcaggcaggcactgtggcccttctgtccaccagacccacctggagcccgcttcaagctctctgttgcgctcccgcatttctcatgcttcttctcatggggtggggttggggcaaagcctcctttttaatacattaagtggggtagactgagggattttagcctcttccctctgatttttcctttcgcgaatccgtatctgcagaatgggccactgtaggggttggggtttattttgttttgttttttttttttttttgtatgacttctgctgaaggacagaacattgccttcctcgtgcagagctggggctgccagcctgagcggaggctcggccgtgggccgggaggcagtgctgatccggctgctcctccagcccttcagacgagatcctgtttcagctaaatgcagggaaactcaatgtttttttaagttttgttttccctttaaagcctttttttaggccacattgacagtggtgggcggggagaagatagggaacactcatccctggtcgtctatcccagtgtgtgtttaacattcacagcccagaaccacagatgtgtctgggagagcctggcaaggcattcctcatcaccatcgtgtttgcaaaggttaaaacaaaaacaaaaaaccacaaaaataaaaaacaaaaaaaacaaaaaacccaaaaaaaaaaaaaaaaagagtcagcccttggcttctgcttcaaaccctcaagaggggaagcaactccgtgtgcctggggttcccgagggagctgctggctgacctgggcccacagagcctggctttggtccccagcattgcagtatggtgtggtgtttgtaggctgtggggtctggctgtgtggccaaggtgaatagcacaggttagggtgtgtgccacaccccatgcacctcagggccaagcgggggcgtggctggcctttcaggtccaggccagtgggcctggtagcacatgtctgtcctcagagcaggggccagatgattttcctccctggtttgcagctgttttcaaagcccccgataatcgctcttttccactccaagatgccctcataaaccaatgtggcaagactactggacttctatcaatggtactctaatcagtccttattatcccagcttgctgaggggcagggagagcgcctcttcctctgggcagcgctatctagataggtaagtgggggcggggaagggtgcatagctgttttagctgagggacgtggtgccgacgtccccaaacctagctaggctaagtcaagatcaacattccagggttggtaatgttggatgatgaaacattcatttttaccttgtggatgctagtgctgtagagttcactgttgtacacagtctgttttctatttgttaagaaaaactacagcatcattgcataattcttgatggtaataaatttgaataatcagatttcttacaaaaaaaaaaaaa

SEQ ID NO: 10 - DNA, 1809 bp, Homo sapiens
cctgctccaaggtccagagagctttctggtctttgcagcaggcctgccgccttcatgtccactctcctcatcaatcagccccagtatgcgtggctgaaagagctggggctccgcgaggaaaacgagggcgtgtataatggaagctggggaggccggggagaggttattacgacctattgccccgctaacaacgagccaatagcaagagtccgacaggccagtgtggcagactatgaagaaactgtaaagaaagcaagagaagcatggaaaatctgggcagatattcctgctccaaaacgaggagaaatagtaagacagattggcgatgccttgcgggagaagatccaagtactaggaagcttggtgtctttggagatggggaaaatcttagtggaaggtgtgggtgaagttcaggagtatgtggatatctgtgactatgctgttggtttatcaaggatgattggaggacctatcttgccttctgaaagatctggccatgcactgattgagcagtggaatcccgtaggcctggttggaatcatcacggcattcaatttccctgtggcagtgtatggttggaacaacgccatcgccatgatctgtggaaatgtctgcctctggaaaggagctccaaccacttccctcattagtgtggctgtcacaaagataatagccaaggttctggaggacaacaagctgcctggtgcaatttgttccttgacttgtggtggagcagatattggcacagcaatggccaaagatgaacgagtgaacctgctgtccttcactgggagcactcaggtgggaaaacaggtgggcctgatggtgcaggagaggtttgggagaagtctgttggaacttggaggaaacaatgccattattgcctttgaagatgcagacctcagcttagttgttccatcagctctcttcgctgctgtgggaacagctggccagaggtgtaccactgcgaggcgactgtttatacatgaaagcatccatgatgaggttgtaaacagacttaaaaaggcctatgcacagatccgagttgggaacccatgggaccctaatgttctctatgggccactccacaccaagcaggcagtgagcatgtttcttggagcagtggaagaagcaaagaaagaaggtggcacagtggtctatgggggcaaggttatggatcgccctggaaattatgtagaaccgacaattgtgacaggtcttggccacgatgcgtccattgcacacacagagactttcgctccgattctctatgtctttaaattcaagaatgaagaagaggtctttgcatggaataatgaagtaaaacagggactttcaagtagcatctttaccaaagatctgggcagaatctttcgctggcttggacctaaaggatcagactgtggcattgtaaatgtcaacattccaacaagtggggctgagattggaggtgcctttggaggagaaaagcacactggtggtggcagggagtctggcagtgatgcctggaaacagtacatgagaaggtctacttgtactatcaactacagtaaagaccttcctctggcccaaggaatcaagtttcagtaaaggtgttttagatgaacatcccttaatttgaggtgttccagcagctgtttttggagaagacaaagaagattaaagttttccctgaataaatgcattattatgactgtgacagtgactaatccccctatgaccccaaagccctgattaaatcaagagattccttttttaaaaatcaaaataaaattgttacaacatagccatagttactaaaaaaaaaaa

SEQ ID NO: 11 - DNA, 1317 bp, Homo sapiens
agctcccgcgcgctagagccgcctgctggtctcacccagccgggaccgctgacctggcgctttgtgcggctccaggcctccgagtggactccagaaagcctgaaaagctatcatggcagcaaggcccaagctccactatcccaacggaagaggccggatggagtccgtgagatgggttttagctgccgccggagtcgagtttgatgaagaatttctggaaacaaaagaacagttgtacaagttgcaggatggtaaccacctgctgttccaacaagtgcccatggttgaaattgacgggatgaagttggtacagacccgaagcattctccactacatagcagacaagcacaatctctttggcaagaacctcaaggagagaaccctgattgacatgtacgtggaggggacactggatctgctggaactgcttatcatgcatcctttcttaaaaccagatgatcagcaaaaggaagtggttaacatggcccagaaggctataattagatactttcctgtgtttgaaaagattttaaggggtcacggacaaagctttcttgttggtaatcagctgagccttgcagatgtgattttactccaaaccattttagctctagaagagaaaattcctaatatcctgtctgcatttcctttcctccaggaatacacagtgaaactaagtaatatccctacaattaagagattccttgaacctggcagcaagaagaagcctccccctgatgaaatttatgtgagaaccgtctacaacatctttaggccataaaacaacacatccatgtgtgagtgacagtgtgttcctagagatggtattgtctacagtcatgtcttaatggatcccagctctgtcatggtgctatctatgtattaagttgggtcctaagttgggtcttttgtgtcaacgagatcatctcttctagaaatatcaaccttttttgtccagtaaataattgttaggggatctttattggaaaacttttttggagaggctggtatttaagttagatctgattgggctactcatgtcctgtagccagttcatcctcataataagaatgggcaggatctcttgttctctcctgagtgtctttctactctcctgagcgtctttctgctctccttatcctgttctcttatccttatcccctccagtctctgcctaatttttagtgtttaataacaaccgaatgtctagtaaatgactctcctctgagctgtaataaataaaatggtagtaatgaatgcaatcagtattagccaaaataaagaatttatgagtcattaaaaaaaaaaaaaaaaaaa

SEQ ID NO: 12 - DNA, 5910 bp, Homo sapiens
cggaggacagccggaccgagccaacgccggggactttgttccctccacggaggggactcggcaactcgcagcggcagggtctggggccggcgcctgggagggatctgcgccccccactcactccctagctgtgttcccgccgccgccccggctagtctccggcgctggcgcctatggtcggcctccgacagcgctccggagggaccgggggagctcccaggcgcccgggactggagactgatgcatgaggggcctacggaggcgcaggagcggtggtgatggtctgggaagcggagctgaagtcccctgggctttggtgaggcgtgacagtttatcatgaccgtgttcaggcaggaaaacgtggatgattactacgacaccggcgaggaacttggcagtggacagtttgcggttgtgaagaaatgccgtgagaaaagtaccggcctccagtatgccgccaaattcatcaagaaaaggaggactaagtccagccggcggggtgtgagccgcgaggacatcgagcgggaggtcagcatcctgaaggagatccagcaccccaatgtcatcaccctgcacgaggtctatgagaacaagacggacgtcatcctgatcttggaactcgttgcaggtggcgagctgtttgacttcttagctgaaaaggaatctttaactgaagaggaagcaactgaatttctcaaacaaattcttaatggtgtttactacctgcactcccttcaaatcgcccactttgatcttaagcctgagaacataatgcttttggatagaaatgtccccaaacctcggatcaagatcattgactttgggttggcccataaaattgactttggaaatgaatttaaaaacatatttgggactccagagtttgtcgctcctgagatagtcaactatgaacctcttggtcttgaggcagatatgtggagtatcggggtaataacctatatcctcctaagtggggcctccccatttcttggagacactaagcaagaaacgttagcaaatgtatccgctgtcaactacgaatttgaggatgaatacttcagtaataccagtgccctagccaaagatttcataagaagacttctggtcaaggatccaaagaagagaatgacaattcaagatagtttgcagcatccctggatcaagcctaaagatacacaacaggcacttagtagaaaagcatcagcagtaaacatggagaaattcaagaagtttgcagcccggaaaaaatggaaacaatccgttcgcttgatatcactgtgccaaagattatccaggtcattcctgtccagaagtaacatgagtgttgccagaagcgatgatactctggatgaggaagactcctttgtgatgaaagccatcatccatgccatcaacgatgacaatgtcccaggcctgcagcaccttctgggctcattatccaactatgatgttaaccaacccaacaagcacgggacacctccattactcattgctgctggctgtgggaatattcaaatactacagttgctcattaaaagaggctcgagaatcgatgtccaggataagggcgggtccaatgccgtctactgggctgctcggcatggccacgtcgataccttgaaatttctcagtgagaacaaatgccctttggatgtgaaagacaagtctggagagatggccctccacgtggcagctcgctatggccatgctgacgtggctcaagttacttgtgcagcttcggctcaaatcccaatatccaggacaaaggaagaagaaacccccctgcactgtgctgcttggcacggctattactctgtggccaaagccctttgtgaagccggctgtaacgtgaacatcaagaaccgagaaggagagacgcccctcctgacagcctctgccaggggctaccacgacatcgtggagtgtctggccgaacatggagccgaccttaatgcttgcgacaaggacggacacattgcccttcatctggctgtaagacggtgtcagatggaggtaatcaagactctcctcagccaagggtgtttcgtcgattatcaagacaggcacggcaatactcccctccatgtggcatgtaaagatggcaacatgcctatcgtggtggccctctgtgaagcaaactgcaatttggacatctccaacaagtatgggcgaacgcctctgcaccttgcggccaacaacggaatcctagacgtggtccggtatctctgtctgatgggagccagcgttgaggcgctgaccacggacggaaagacggcagaagatcttgctagatcggaacagcacgagcacgtagcaggtctccttgcaagacttcgaaaggatacgcaccgaggactcttcatccagcagctccgacccacacagaacctgcagccaagaattaagctcaagctgtttggccactcgggatccgggaaaaccacccttgtagaatctctcaagtgtgggctgctgaggagctttttcagaaggcgtcggcccagactgtcttccaccaactccagcaggttcccaccttcacccctggcttctaagcccacagtctcagtgagcatcaacaacctgtacccaggctgcgagaacgtgagtgtgaggagccgcagcatgatgttcgagccgggtcttaccaaagggatgctggaggtgtttgtggccccgacccaccacccgcactgctcggccgatgaccagtccaccaaggccatcgacatccagaacgcttatttgaatggagttggcgatttcagcgtgtgggagttctctggaaatcctgtgtatttctgctgttatgactattttgctgcaaatgatcccacgtcaatccatgttgttgtctttagtctagaagagccctatgagatccagctgaacccagtgattttctggctcagtttcctgaagtcccttgtcccagttgaagaacccatagccttcggtggcaagctgaagaacccactccaagttgtcctggtggccacccacgctgacatcatgaatgttcctcgaccggctggaggcgagtttggatatgacaaagacacatcgttgctgaaagagattaggaacaggtttggaaatgatcttcacatttcaaataagctgtttgttctggatgctggggcttctgggtcaaaggacatgaaggtacttcgaaatcatctgcaagaaatacgaagccagattgtttcggtctgtcctcccatgactcacctgtgtgagaaaatcatctccacgctgccttcctggaggaagctcaatggacccaaccagctgatgtcgctgcagcagtttgtgtacgacgtgcaggaccagctgaaccccctggccagcgaggaggacctcaggcgcattgctcagcagctccacagcacaggcgagatcaacatcatgcaaagtgaaacagttcaggacgtgctgctcctggacccccgctggctctgcacaaacgtcctggggaagttgctgtccgtggagaccccacgggcgctgcaccactaccggggccgctacaccgtggaggacatccagcgcctggtgcccgacagcgacgtggaggagctgctgcagatcctcgatgccatggacatctgcgcccgggacctgagcagcgggaccatggtggacgtcccagccctgatcaagacagacaacctgcaccgctcctgggctgatgaggaggacgaggtgatggtgtatggtggcgtgcgcatcgtgcccgtggaacacctcacccccttcccatgtggcatctttcacaaggtccaggtgaacctgtgccggtggatccaccagcaaagcacagagggcgacgcggacatccgcctgtgggtgaatggctgcaagctggccaaccgtggggccgagctgctggtgctgctggtcaaccacggccagggcattgaggtccaggtccgtggcctggagacggagaagatcaagtgctgcctgctgctggactcggtgtgcagcaccattgagaacgtcatggccaccacgctgccagggctcctgaccgtgaagcattacctgagcccccagcagctgcgggagcaccatgagcccgtcatgatctaccagccacgggacttcttccgggcacagactctgaaggaaacctcactgaccaacaccatgggggggtacaaggaaagcttcagcagcatcatgtgcttcgggtgtcacgacgtctactcacaggccagcctcggcatggacatccatgcatcagacctgaacctcctcactcggaggaaactgagtcgcctgctggacccgcccgaccccctggggaaggactggtgccttctcgccatgaacttaggcctccctgacctcgtggcaaagtacaacaccaataacggggctcccaaggatttcctccccagccccctccacgccctgctgcgggaatggaccacctaccctgagagcacagtgggcaccctcatgtccaaactgagggagctgggtcgccgggatgccgcagaccttttgctgaaggcatcctctgtgttcaaaatcaacctggatggcaatggccaggaggcctatgcctcgagctgcaacagcggcacctcttacaattccattagctctgttgtatcccggtgagggcagcctctggcttggacagggtctgtttggactgcagaaccaagggggtgatgtagcccatccttccctttggagatgctgagggtgtttcttcctgcacccacagccagggggatgccactcctccctccggcttgacctgtttctctgccgctacctccctccccgtctcattccgttgtctgtggatggtcattgcagtttaagagcagaacagatcttttactttggccgcttgaaaagctagtgtacctcctctcagtgttttggactccatctctcatcctccagtaccttgcttcttactgataattttgctggaattcctaacttttcaatgacattttttttaactatcatattgattgtcctttaaaaaagaaaagtgcatatttatccaaaatgtgtatttcttatacgcttttctgtgttataccatttcctcagcttatctcttttatatttgtaggagaaactcccatgtatggaatcccactgtatgatttataaacagacaatatgtgagtgccttttgcagaagagggtgtgtttgaaatcatcggagtcagccaggagctgtcaccaaggaaacgctacctctctgtcccttgctgtatgctgatcatcgccagaggtgcttcaccctgagttttgttttgtattgttttctgacagtttttctgttttgtttggcaaggaaaggggagaagggaatcctcctccagggtgattttatgatcagtgttgttgctctaggaagacatttttccgtttgcttttgttccaatgtcaatgtgaacgtccacatgaaacctacacactgtcatgcttcatcattccctctcatctcaggtagaaggttgacacagttgtagggttacagagacctatgtaagaattcagaagacccctgactcatcatttgtggcagtcccttataattggtgcatagcagatggtttccacatttagatcctggtttcataacttcctgtacttgaagtctaaaagcagaaaataaaggaagcaagttttcttccatgattttaaattgtgatcgagttttaaattgataggagggaacatgtcctaattcttctgtcctgagaagcatgtaatgttaatgttatatcatatgtatatatatatatgcactatgtatatacatatatattaatactggtatttttacttaatctataaaatgtcgttaaaaagttgtttgtttttttctttttttataaataaactgttgctcgttaaaaaaaaaaaaaa

SEQ ID NO: 13 - DNA, 980 bp, Homo sapiens
gcgcgggggagccattaggaggcgaggagagaggagggcgcagctcccgcccagcccagccctgcccagccctgcccggaggcagacgcgccggaaccgggacgcgataaatatgcagagcggaggcttcgcgcagcagagcccgcgcgccgcccgctccgggtgctgaatccaggcgtggggacacgagccaggcgccgccgccggagccagcggagccggggccagagccggagcgcgtccgcgtccacgcagccgccggccggccagcacccagggccctgcatgccaggtcgttggaggtggcagcgagacatgcacccggcccggaagctcctcagcctcctcttcctcatcctgatgggcactgaactcactcaaaataaaagagaaaacaaagcagagaagatgggagggccagagagcgagaggaagaccacaggagagaagacactgaacgagcttcccttgttttgcctggaagcccacgctggctccctggctctgcccaggatgtgcagtccaaatcccaatccagcagtggggttatgtcgtcccgcttaccctcagagcccttctcctggtgctgcccagacgatcagccagtccctcctggagaggttctgcatggcctctaggagagaagttttcttggccccaggaaggcctggtggagggtggtggttgtgcactgttgctggacagatgcattcattcatgtgcacacacacacacacacatgcacacacaggggagcagatacctgcagagaagagccaaccaggtcctgattagtggcaagctgccccacaaagggctatgcctgtgtcttattgagacaccttggcaaagagatggctgattctgggtggtcctggacatggccgcacccaagggccctccaagccttaatggcaccctgaagcctccatgcccaggccaaaagatgcttttcctccctaaaaaaaaaaaaaaaaaaa

SEQ ID NO: 14 - DNA, 1721 bp, Homo sapiens
caccagcacagcaaacccgccgggatcaaagtgtaccagtcggcagcatggctacgaaatgtgggaattgtggacccggctactccacccctctggaggccatgaaaggacccagggaagagatcgtctacctgccctgcatttaccgaaacacaggcactgaggccccagattatctggccactgtggatgttgaccccaagtctccccagtattgccaggtcatccaccggctgcccatgcccaacctgaaggacgagctgcatcactcaggatggaacacctgcagcagctgcttcggtgatagcaccaagtcgcgcaccaagctggtgctgcccagtctcatctcctctcgcatctatgtggtggacgtgggctctgagccccgggccccaaagctgcacaaggtcattgagcccaaggacatccatgccaagtgcgaactggcctttctccacaccagccactgcctggccagcggggaagtgatgatcagctccctgggagacgtcaagggcaatggcaaagggggttttgtgctgctggatggggagacgttcgaggtgaaggggacatgggagagacctgggggtgctgcaccgttgggctatgacttctggtaccagcctcgacacaatgtcatgatcagcactgagtgggcagctcccaatgtcttacgagatggcttcaaccccgctgatgtggaggctggactgtacgggagccacttatatgtatgggactggcagcgccatgagattgtgcagaccctgtctctaaaagatgggcttattcccttggagatccgcttcctgcacaacccagacgctgcccaaggctttgtgggctgcgcactcagctccaccatccagcgcttctacaagaacgagggaggtacatggtcagtggagaaggtgatccaggtgccccccaagaaagtgaagggctggctgctgcccgaaatgccaggcctgatcaccgacatcctgctctccctggacgaccgcttcctctacttcagcaactggctgcatggggacctgaggcagtatgacatctctgacccacagagaccccgcctcacaggacagctcttcctcggaggcagcattgttaagggaggccctgtgcaagtgctggaggacgaggaactaaagtcccagccagagcccctagtggtcaagggaaaacgggtggctggaggccctcagatgatccagctcagcctggatgggaagcgcctctacatcaccacgtcgctgtacagtgcctgggacaagcagttttaccctgatctcatcagggaaggctctgtgatgctgcaggttgatgtagacacagtaaaaggagggctgaagttgaaccccaacttcctggtggacttcgggaaggagccccttggcccagcccttgcccatgagctccgctaccctgggggcgattgtagctctgacatctggatttgaactccaccctcatcacccacactccctattttgggccctcacttccttggggacctggcttcattctgctctctcttggcacccgacccttggcagcatgtaccacacagccaagctgagactgtggcaatgtgttgagtcatatacatttactgaccactgttgcttgttgctcactgtgctgcttttccatgagctcttggaggcaccaagaaataaactcgtaaccctgtccttcaaaaaaaaaaaaaaaaa

SEQ ID NO: 15 - DNA, 2588 bp, Homo sapiens
ggcacgaggctctctcctccctctttcttcgggcagcctccccaccaccccacttcagcctcccccactcttgccgcctccatatcatcaagctctggtggcgcctggggggcttttcggatcggcaggatgtacccccagggaaggcacccgaccccgctccagtccggccagcccttcaagttctcgatcttggagatctgcgaccgcatcaaagaagaattccagtttcttcaggctcaataccacagcctcaagctagaatgtgagaagctggccagcgagaagacggaaatgcagcgacattatgtcatgtattatgagatgtcgtacgggctcaacattgaaatgcataagcaggcggagattgtgaagcgtctgagcggtatctgcgctcagattatccccttcctgacccaggagcatcagcagcaggtgctccaggccgtagaacgcgccaagcaggtcaccgtgggggagctgaacagcctcatcgggcagcagctccagccgctgtcccaccacgcaccccctgtgcccctcaccccccgcccagccgggctggtgggcggcagtgctacggggctgcttgctctgtctggagccctggctgcccaggctcagctggcggcggctgtcaaggaggaccgtgcgggcgtggaggccgaggggtccagagtggagagagccccgagcaggagtgcatctccctcgccccctgagagtctcgtggaggaggagcgaccgagtggccctggtggtggcgggaagcagagagcagatgagaaggagccatcaggaccttatgaaagcgacgaagacaagagtgattacaatctggtggtggacgaggaccaaccctcagagccccccagcccggctaccaccccctgcggaaaggtacccatctgcattcctgcccgtcgggacctggtggacagtccagcctccttggcctctagccttggctcaccgctgcctagagccaaggagctcatcctgaatgaccttcccgccagcactcctgcctccaaatcctgtgactcctccccgccccaggacgcttccacccccgggcccagctcggccagtcacctctgccagcttgctgccaagccagcaccttccacggacagcgtcgccctgaggagccccctgactctgtccagtcccttcaccacgtccttcagcctgggctcccacagcactctcaacggagacctctccgtgcccagctcctacgtcagcctccacctgtccccccaggtcagcagctctgtggtgtacggacgctcccccgtgatggcatttgagtctcatccccatctccgagggtcatccgtctcttcctccctacccagcatccctgggggaaagccggcctactccttccacgtgtctgcggacgggcagatgcagccggttcccttcccctcggatgcactggtaggcgcgggcatcccgcggcacgcccggcagctgcacacgctggcccatggcgaggtggtctgcgcggtcaccatcagcggctccacacagcatgtgtacacgggcggcaagggctgtgtgaaggtgtgggacgtgggccagcctggggccaagacgcccgtggcccagctcgactgcctgaaccgagacaactacattcgttcctgcaagttgctgccggatggccggagtctgatcgtgggcggtgaggccagcaccttgtccatttgggacctggcggcgcccaccccccgtatcaaggccgagctgacttcctcagccccagcctgctacgccctggccgtcagccccgacgccaaggtttgcttctcctgctgcagcgatggcaacattgtggtctgggacctgcagaatcagactatggtcaggcagttccagggccacacggacggcgccagctgcattgatatttccgattacggcactcggctctggacagggggcctggacaacacggtgcgctgctgggacctgcgggagggccgccagctgcagcagcatgacttcagctcccagattttctccctgggccactgccctaaccaggactggctggcggtcggaatggagagtagcaacgtggagatcctgcacgtccgcaagccggagaaataccagctgcacctccacgagagctgcgtgctgtccctgaagtttgcctcctgcggacggtggtttgtgagcaccgggaaggacaacctgctcaacgcctggaggacgccgtacggggccagcattttccagtccaaggagtcgtcctcagtcctgagttgtgacatctccagaaataacaaatacatcgtgacaggctcgggggacaagaaggccaccgtgtatgaggtggtctactgagacatgaccccccttcctgtacccgaagtccagactcccaggggaatcagcagccaggacagacatcctagcagccgcctcccagccctgcctaggaaccgtacatcccatctgctctctggccaacggcttcacaccttcccctgctgcatgtgggggccgatgggcaggggacctcggtggaaataaaatgtatctatcacatccgcaaaaaaaaaaaaaaaaaa

SEQ ID NO: 16 - DNA, 8133 bp, Homo sapiens
cgtccctgcagccctcgcccggcgctccagtagcaggacccggtctcgggaccagccggtaatatgcacgtgtcactagctgaggccctggaggttcggggtggaccacttcaggaggaagaaatatgggctgtattaaatcaaagtgctgaaagtctccaagaattattcagaaaagtaagcctagctgatcctgctgcccttggcttcatcatttctccatggtctctgctgttgctgccatctggtagtgtgtcatttacagatgaaaatatttccaatcaggatcttcgagcattcactgcaccagaggttcttcaaaatcagtcactaacttctctctcagatgttgaaaagatccacatttattctcttggaatgacactgtattggggggctgattatgaagtgcctcagagccaacctattaagcttggagatcatctcaacagcatactgcttggaatgtgtgaggatgttatttacgctcgagtttctgttcggactgtgctggatgcttgcagtgcccacattaggaatagcaattgtgcaccctcattttcctacgtgaaacacttggtaaaactggttctgggaaatctttctgggacagatcagctttcctgtaacagtgaacaaaagcctgatcgaagccaggctattcgagatcgattgcgaggaaaaggattaccaacaggaagaagctctacttctgatgtactagacatacaaaagcctccactctctcatcagacctttcttaacaaagggcttagtaaatctatgggatttctgtccatcaaagatacacaagatgagaattatttcaaggacattttatcagataattctggacgtgaagattctgaaaatacattctccccttaccagttcaaaactagtggcccagaaaaaaaacccatccctggcattgatgtgctttctaagaagaagatctgggcttcatccatggacttgctttgtacagctgacagagacttctcttcaggagagactgccacatatcgtcgttgtcaccctgaggcagtaacagtgcggacttcaactactcctagaaaaaaggaggcaagatactcagatggaagtatagccttggatatctttggccctcagaaaatggatccaatatatcacactcgagaattgcccacctcctcagcaatatcaagtgctttggaccgaatccgagagagacaaaagaaacttcaggttctgagggaagccatgaatgtagaagaaccagttcgaagatacaaaacttatcatggtgatgtctttagtacctccagtgaaagtccatctattatttcctctgaatcagatttcagacaagtgagaagaagtgaagcctcaaagaggtttgaatccagcagtggtctcccaggggtagatgaaaccttaagtcaaggccagtcacagagaccgagcagacaatatgaaacaccctttgaaggcaacttaattaatcaagagatcatgctaaaacggcaagaggaagaactgatgcagctacaagccaaaatggcccttagacagtctcggttgagcctatatccaggagacacaatcaaagcgtccatgcttgacatcaccagggatccgttaagagaaattgccctagaaacagccatgactcaaagaaaactgaggaatttctttggccctgagtttgtgaaaatgacaattgaaccatttatatctttggatttgccacggtctattcttactaagaaagggaagaatgaggataaccgaaggaaagtaaacataatgcttctgaacgggcaaagactggaactgacctgtgataccaaaactatatgtaaagatgtgtttgatatggttgtggcacatattggcttagtagagcatcatttgtttgctttagctaccctcaaagataatgaatatttctttgttgatcctgacttaaaattaaccaaagtggccccagagggatggaaagaagaaccaaagaaaaagaccaaagccactgttaattttactttgtttttcagaattaaattttttatggatgatgttagtctaatacaacatactctgacgtgtcatcagtattaccttcagcttcgaaaagatattttggaggaaaggatgcactgtgatgatgagacttccttattgctggcatccttggctctccaggctgagtatggagattatcaaccagaggttcatggtgtgtcttactttagaatggagcactatttgcccgccagagtgatggagaaacttgatttatcctatatcaaagaagagttacccaaattgcataatacctatgtgggagcttctgaaaaagagacagagttagaatttttaaaggtctgccaaagactgacagaatatggagttcattttcaccgagtgcaccctgagaagaagtcacaaacaggaatattgcttggagtctgttctaaaggtgtccttgtgtttgaagttcacaatggagtgcgcacattggtccttcgctttccatggagggaaaccaagaaaatatctttttctaaaaagaaaatcacattgcaaaatacatcagatggaataaaacatggcttccagacagacaacagtaagatatgccagtacctgctgcacctctgctcttaccagcataagttccagctacagatgagagcaagacagagcaaccaagatgcccaagatattgagagagcttcgtttaggagcctgaatctccaagcagagtctgttagaggatttaatatgggacgagcaatcagcactggcagtctggccagcagcaccctcaacaaacttgctgttcgacctttatcagttcaagctgagattctgaagaggctatcctgctcagagctgtcgctttaccagccattgcaaaacagttcaaaagagaagaatgacaaagcttcatgggaggaaaagcctagagagatgagtaaatcataccatgatctcagtcaggcctctctctatccacatcggaaaaatgtcattgttaacatggaacccccaccacaaaccgttgcagagttggtgggaaaaccttctcaccagatgtcaagatctgatgcagaatctttggcaggagtgacaaaacttaataattcaaagtctgttgcgagtttaaatagaagtcctgaaaggaggaaacatgaatcagactcctcatccattgaagaccctgggcaagcatatgttctaggaatgactatgcatagttctggaaactcttcatcccaagtacccttaaaagaaaatgatgtgctacacaaaagatggagcatagtatcttcaccagaaagggagatcaccttagtgaacctgaaaaaagatgcaaagtatggcttgggatttcaaattattggtggggagaagatgggaagactggacctaggcatatttatcagttcagttgcccctggaggaccagctgacttggatggatgcttgaagccaggagaccgtttgatatctgtgaatagtgtgagtctggagggagtcagccaccatgctgcaattgaaattttgcaaaatgcacctgaagatgtgacacttgttatctctcagccaaaagaaaagatatccaaagtgccttctactcctgtgcatctcaccaatgagatgaaaaactacatgaagaaatcttcctacatgcaagacagtgctatagattcttcttccaaggatcaccactggtcacgtggtaccctgaggcacatctcggagaactcctttgggccgtctgggggcctgcgggaaggaagcctgagttctcaagattccaggactgagagtgccagcttgtctcaaagccaggtcaatggtttctttgccagccatttaggtgaccaaacctggcaggaatcacagcatggcagcccttccccatctgtaatatccaaagccaccgagaaagagactttcactgatagtaaccaaagcaaaactaaaaagccaggcatttctgatgtaactgattactcagaccgtggagattcagacatggatgaagccacttactccagcagtcaggatcatcaaacaccaaaacaggaatcttcctcttcagtgaatacatccaacaagatgaattttaaaactttttcttcatcacctcctaagcctggagatatctttgaggttgaactggctaaaaatgataacagcttggggataagtgtcacggtactgtttgacaagggaggtgtgaatacgagtgtcagacatggtggcatttatgtgaaagctgttattccccagggagcagcagagtctgatggtagaattcacaaaggtgatcgcgtcctagctgtcaatggagttagtctagaaggagccacccataagcaagctgtggaaacactgagaaatacaggacaggtggttcatctgttattagaaaagggacaatctccaacatctaaagaacatgtcccggtaaccccacagtgtaccctttcagatcagaatgcccaaggtcaaggcccagaaaaagtgaagaaaacaactcaggtcaaagactacagctttgtcactgaagaaaatacatttgaggtaaaattatttaaaaatagctcaggtctaggattcagtttttctcgagaagataatcttataccggagcaaattaatgccagcatagtaagggttaaaaagctctttcctggacagccagcagcagaaagtggaaaaattgatgtaggagatgttatcttgaaagtgaatggagcctctttgaaaggactatctcagcaggaagtcatatctgctctcaggggaactgctccagaagtattcttgcttctctgcagacctccacctggtgtgctaccggaaattgatactgcgcttttgaccccacttcagtctccagcacaagtacttccaaacagcagtaaagactcttctcagccatcatgtgtggagcaaagcaccagctcagatgaaaatgaaatgtcagacaaaagcaaaaaacagtgcaagtccccatccagaagagacagttacagtgacagcagtgggagtggagaagatgacttagtgacagctccagcaaacatatcaaattcgacctggagttcagctttgcatcagactctaagcaacatggtatcacaggcacagagtcatcatgaagcacccaagagtcaagaagataccatttgtaccatgttttactatcctcagaaaattcccaataaaccagagtttgaggacagtaatccttcccctctaccaccggatatggctcctgggcagagttatcaaccccaatcagaatctgcttcctctagttcgatggataagtatcatatacatcacatttctgaaccaactagacaagaaaactggacacctttgaaaaatgacttggaaaatcaccttgaagactttgaactggaagtagaactcctcattaccctaattaaatcagaaaaaggaagcctgggttttacagtaaccaaaggcaatcagagaattggttgttatgttcatgatgtcatacaggatccagccaaaagtgatggaaggctaaaacctggggaccggctcataaaggttaatgatacagatgttactaatatgactcatacagatgcagttaatctgctccgggctgcatccaaaacagtcagattagttattggacgagttctagaattacccagaataccaatgttgcctcatttgctaccggacataacactaacgtgcaacaaagaggagttgggtttttccttatgtggaggtcatgacagcctttatcaagtggtatatattagtgatattaatccaaggtccgtcgcagccattgagggtaatctccagctattagatgtcatccattatgtgaacggagtcagcacacaaggaatgaccttggaggaagttaacagagcattagacatgtcacttccttcattggtattgaaagcaacaagaaatgatcttccagtggtccccagctcaaagaggtctgctgtttcagctccaaagtcaaccaaaggcaatggttcctacagtgtggggtcttgcagccagcctgccctcactcctaatgattcattctccacggttgctggggaagaaataaatgaaatatcgtaccccaaaggaaaatgttctacttatcagataaagggatcaccaaacttgactctgcccaaagaatcttatatacaagaagatgacatttatgatgattcccaagaagctgaagttatccagtctctgctggatgttgtggatgaggaagcccagaatcttttaaacgaaaataatgcagcaggatactcctgtggtccaggtacattaaagatgaatgggaagttatcagaagagagaacagaagatacagactgcgatggttcacctttacctgagtattttactgaggccaccaaaatgaatggctgtgaagaatattgtgaagaaaaagtaaaaagtgaaagcttaattcagaagccacaagaaaagaagactgatgatgatgaaataacatggggaaatgatgagttgccaatagagagaacaaaccatgaagattctgataaagatcattcctttctgacaaacgatgagctcgctgtactccctgtcgtcaaagtgcttccctctggtaaatacacgggtgccaacttaaaatcagtcattcgagtcctgcggggtttgctagatcaaggaattccttctaaggagctggagaatcttcaagaattaaaacctttggatcagtgtctaattgggcaaactaaggaaaacagaaggaagaacagatataaaaatatacttccctatgatgctacaagagtgcctcttggagatgaaggtggctatatcaatgccagcttcattaagataccagttgggaaagaagagttcgtttacattgcctgccaaggaccactgcctacaactgttggagacttctggcagatgatttgggagcaaaaatccacagtgatagccatgatgactcaagaagtagaaggagaaaaaatcaaatgccagcgctattggcccaacatcctaggcaaaacaacaatggtcagcaacagacttcgactggctcttgtgagaatgcagcagctgaagggctttgtggtgagggcaatgacccttgaagatattcagaccagagaggtgcgccatatttctcatctgaatttcactgcctggccagaccatgatacaccttctcaaccagatgatctgcttacttttatctcctacatgagacacatccacagatcaggcccaatcattacgcactgcagtgctggcattggacgttcagggaccctgatttgcatagatgtggttctgggattaatcagtcaggatcttgattttgacatctctgatttggtgcgctgcatgagactacaaagacacggaatggttcagacagaggatcaatatattttctgctatcaagtcatcctttatgtcctgacacgtcttcaagcagaagaagagcaaaaacagcagcctcagcttctgaagtgacatgaaaagagcctctggatgcatttccatttctctccttaacctccagcagactcctgctctctatccaaaataagatcacagagcagcaagttcatacaacatgcatgttctcctctatcttagaggggtattcttcttgaaaataaaaaatattgaaatgctgtatttttacagctactttaacctatgataattatttacaaaattttaacactaaccaaacaatgcagatcttagggatgattaaaggcagcatttgatgatagcagacattgttacaaggacatggtgagtctatttttaatgcaccaatcttgtttatagcaaaaatgttttccaatattttaataaagtagttattttataggggatacttgaaaccagtatttaagctttaaatgacagtaatattggcatagaaaaaagtagcaaatgtttactgtatcaatttctaatgtttactatatagaatttcctgtaatatatttatatactttttcatgaaaatggagttatcagttatctgtttgttactgcatcatctgtttgtaatcattatctcactttgtaaataaaaacacaccttaaaacatg

SEQ ID NO: 17 - DNA, 2272 bp, Homo sapiens
aggcgcccgcccgccgcgcgtgattctcgcctcgccgcagcccagccctgcgcgccttgcccggcggcccccgcccggccgctccgggcccctggccccgcggagcgatgctgctgctggctgccgccttcctcgtggccttcgtgctgctgctgtacatggtgtctccgctcatcagccccaagcccctcgccctgcccggggcgcatgtggtggttacaggaggttccagtggcatcgggaagtgcattgctatcgagtgctataaacaaggagcttttataactctggttgcacgaaatgaggataagctgctgcaggcaaagaaagaaattgaaatgcactctattaatgacaaacaggtggtgctttgcatatcagttgatgtatctcaagactataaccaagtagagaatgtcataaaacaagcacaggagaaactgggtccagtggacatgctggtaaattgtgcaggaatggcagtgtcaggaaaatttgaagatcttgaagttagtacctttgaaaggttaatgagcatcaattacctgggcagcgtgtaccccagccgggccgtgatcaccaccatgaaggagcgccgggtgggcaggatcgtgtttgtgtcctcccaggcaggacagttgggattattcggtttcacagcctactctgcatccaagtttgccataaggggattggcagaagctttgcagatggaggtgaagccatataatgtctacatcacagttgcttacccaccagacacagacacacctggctttgccgaagaaaacagaacaaagcctttggagactcgacttatttcagagaccacatctgtgtgcaaaccagaacaggtggccaaacaaattgttaaagatgccatacaaggaaatttcaacagttcccttggctcagatgggtacatgctctcggccctgacctgtgggatggctccagtaacttctattactgaggggctccagcaggtggtcaccatgggccttttccgcactattgctttgttttaccttggaagttttgacagcatagttcgtcgctgcatgatgcagagagaaaaatctgaaaatgcagacaaaactgcctaatcttcttaccccttggaagaagactgtttccaaataatttgaacagcttgctgctaaatgggacccaatttttggcctatagacacttatgtattgttttcgaatacgtcagattggaccagtgctcttcaggaatgtggctgcaagcaaggggctagaagttcacctcctgacagtattattaatactatgcaaatatggaataggagaccatttgattttctaggctttgtggtagagaggtgaaggtatgagaattaatagcgtgtgaacaaagtaaagaacaggattccagaatgatcattaaatttgtttctatttattcttttttgcccccctagagattaagtccagaaatgtactttctggcacataaagaaatcttgaggactttgtttaaaccttccataaaaaaacaattttcggtttctcgggttctctctctctgtctctctgtctctctgtctctctgtctctctgtctctctctctctctctctttctttctttgtgtattttattcaagatgagttggacccattgccagtgagtctgaatgtcactgacagccctgtgttgtgctcaggactcactctgctgctggtggaaactcatggcttctctctctctttgatcccataaagctacgagggggacgggagagggcagtgcaatgggaagtaaagagatattttccagtaggaaaagcaatgctttcttgtctttagactcaaatgcttagggaacgtttcatttctcattcatggggaaaggcagcctccttaaatgttttctgaagagcggtaaaatctagaagcttaagaatttacagttccttcaataaccatgatgacctgaagttcacctatcccattttagcatctacttgtttttcccatctcttcctttccaattttgcttatactgctgtaatatttttgtaaaaaaaaaaaaaaaggaaaaaaaagaccagctaaaattttcgacttgactttttaacttaactcatgaattaattaaagcaaatgaaaaaattaaaaagtgtgactttttctcggagcatatatgtagcttttaggaaaggctgatgatggtataaagtttgctcattaagaaaaaaagacaaggctgattttgaagagagttgcttttgaaataaaatgatca

SEQ ID NO: 18 - DNA, 1414 bp, Homo sapiens
gaattcgcactgctctgagaatttgtgagcagcccctaacaggctgttacttcactacaactgacgatatgatcatcttaatttacttatttctcttgctatgggaagacactcaaggatggggattcaaggatggaatttttcataactccatatggcttgaacgagcagccggtgtgtaccacagagaagcacggtctggcaaatacaagctcacctacgcagaagctaaggcggtgtgtgaatttgaaggcggccatctcgcaacttacaagcagctagaggcagccagaaaaattggatttcatgtctgtgctgctggatggatggctaagggcagagttggataccccattgtgaagccagggcccaactgatgatttggaaaaactggcattattgattatggaatccgtctcaataggagtgaaagatgggatgcctattgctacaacccacacgcaaaggagtgtggtggcgtctttacagatccaaagcgaatttttaaatctccaggcttcccaaatgagtacgaagataaccaaatctgctactggcacattagactcaagtatggtcagcgtattcacctgagttttttagattttgaccttgaagatgacccaggttgcttggctgattatgttgaaatatatgacagttacgatgatgtccatggctttgtgggaagatactgtggagatgagcttccagatgacatcatcagtacaggaaatgtcatgaccttgaagtttctaagtgatgcttcagtgacagctggaggtttccaaatcaaatatgttgcaatggatcctgtatccaaatccagtcaaggaaaaaatacaagtactacttctactggaaataaaaactttttagctggaagatttagccacttataaaaaaaaaaaaggatgatcaaaacacacagtgtttatgttggaatcttttggaactcctttgatctcactgttattattaacatttatttattatttttctaaatgtgaaagaaatacataatttagggaaaattggaaaatataggaaactttaaacgagaaaatgaaacctctcataatcccactgcatagaaataacaagcgttaacattttcatatttttttctttcagtcatttttgtatttgtggtatatgtatatatgtacctatatgtatttgcatttgaaattttggaatcctgctctatgtacagttttgtattatactttttaaatcttgaactttatgaacattttctgaaatcattgattattctacaaaaacatgattttaaacagctgtaaaatattctatgatatgaatgttttatgcattatttaagcctgtctctattgttggaatttcaggtcattttcataaatattgttgcaataaatatccttcggaattc

SEQ ID NO: 19 - DNA, 2704 bp, Homo sapiens
gggagaaacgttctcactcgctctctgctcgctgcgggcgctccccgccctctgctgccagaaccttggggatgtgcctagacccggcgcagcacacgtccgggccaaccgcgagcagaacaaacctttggcgggcggccaggaggctccctcccagccaccgcccccctccagcgcctttttttccccccatacaatacaagatcttccttcctcagttcccttaaagcacagcccagggaaacctcctcacagttttcatccagccacgggccagcatgtctgggggcaaatacgtagactcggagggacatctctacaccgttcccatccgggaacagggcaacatctacaagcccaacaacaaggccatggcagacgagctgagcgagaagcaagtgtacgacgcgcacaccaaggagatcgacctggtcaaccgcgaccctaaacacctcaacgatgacgtggtcaagattgactttgaagatgtgattgcagaaccagaagggacacacagttttgacggcatttggaaggccagcttcaccaccttcactgtgacgaaatactggttttaccgcttgctgtctgccctctttggcatcccgatggcactcatctggggcatttacttcgccattctctctttcctgcacatctgggcagttgtaccatgcattaagagcttcctgattgagattcagtgcatcagccgtgtctattccatctacgtccacaccgtctgtgacccactctttgaagctgttgggaaaatattcagcaatgtccgcatcaacttgcagaaagaaatataaatgacatttcaaggatagaagtatacctgattttttttccttttaattttcctggtgccaatttcaagttccaagttgctaatacagcaacaatttatgaattgaattatcttggttgaaaataaaaagatcactttctcagttttcataagtattatgtctcttctgagctatttcatctatttttggcagtctgaatttttaaaacccatttaaatttttttccttacctttttatttgcatgtggatcaaccatcgctttattggctgagatatgaacatattgttgaaaggtaatttgagagaaatatgaagaactgaggaggaaaaaaaaaaaaaagaaaagaaccaacaacctcaactgcctactccaaaatgttggtcattttatgttaagggaagaattccagggtatggccatggagtgtacaagtatgtgggcagattttcagcaaactcttttcccactgtttaaggagttagtggattactgccattcacttcataatccagtaggatccagtgatccttacaagttagaaaacataatcttctgccttctcatgatccaactaatgccttactcttcttgaaattttaacctatgatattttctgtgcctgaatatttgttatgtagataacaagacctcagtgccttcctgtttttcacattttccttttcaaatagggtctaactcagcaactcgctttaggtcagcagcctccctgaagaccaaaattagaatatccatgacctagttttccatgcgtgtttctgactctgagctacagagtctggtgaagctcacttctgggcttcatctggcaacatctttatccgtagtgggtatggttgacactagcccaatgaaatgaattaaagtggaccaatagggctgagctctctgtgggctggcagtcctggaagccagctttccctgcctctcatcaactgaatgaggtcagcatgtctattcagcttcgtttattttcaagaataatcacgctttcctgaatccaaactaatccatcaccggggtggtttagtggctcaacattgtgttcccatttcagctgatcagtgggcctccaaggaggggctgtaaaatggaggccattgtgtgagcctatcagagttgctgcaaacctgacccctgctcagtaaagcacttgcaaccgtctgttatgctgtgacacatggcccctccccctgccaggagctttggacctaatccaagcatccctttgcccagaaagaagatgggggaggaggcagtaataaaaagattgaagtattttgctggaataagttcaaattcttctgaactcaaactgaggaatttcacctgtaaacctgagtcgtacagaaagctgcctggtatatccaaaagctttttattcctcctgctcatattgtgattctgcctttggggacttttcttaaaccttcagttatgatttttttttcatacacttattggaactctgcttgatttttgcctcttccagtcttcctgacactttaattaccaacctgttacctactttgactttttgcatttaaaacagacactggcatggatatagttttacttttaaactgtgtacataactgaaaatgtgctatactgcatactttttaaatgtaaagatatttttatctttatatgaagaaaatcacttaggaaatggctttgtgattcaatctgtaaactgtgtattccaagacatgtctgttctacatagatgcttagtccctcatgcaaatcaattactggtccaaaagattgctgaaattttatatgcttactgatatattttacaattttttatcatgcatgtcctgtaaaggttacaagcctgcacaataaaaatgtttaacggtt

SEQ ID NO: 20 - DNA, 1440 bp, Homo sapiens
cgggcgcagaagcccctcctcggcgtcctggtcccggccgtgcccgcggtgtcccgggaggaaggggcgggccgggggtcgggaggagtcacgtgccccctcccgccccaggtcgtcctctcagcatgggggtcccgcggcctcagccctgggcgctggggctcctgctctttctccttcctgggagcctgggcgcagaaagccacctctccctcctgtaccaccttaccgcggtgtcctcgcctgccccggggactcctgccttctgggtgtccggctggctgggcccgcagcagtacctgagctacaatagcctgcggggcgaggcggagccctgtggagcttgggtctgggaaaaccaggtgtcctggtattgggagaaagagaccacagatctgaggatcaaggagaagctctttctggaagctttcaaagctttggggggaaaaggtccctacactctgcagggcctgctgggctgtgaactgggccctgacaacacctcggtgcccaccgccaagttcgccctgaacggcgaggagttcatgaatttcgacctcaagcagggcacctggggtggggactggcccgaggccctggctatcagtcagcggtggcagcagcaggacaaggcggccaacaaggagctcaccttcctgctattctcctgcccgcaccgcctgcgggagcacctggagaggggccgcggaaacctggagtggaaggagcccccctccatgcgcctgaaggcccgacccagcagccctggcttttccgtgcttacctgcagcgccttctccttctaccctccggagctgcaacttcggttcctgcggaatgggctggccgctggcaccggccagggtgacttcggccccaacagtgacggatccttccacgcctcgtcgtcactaacagtcaaaagtggcgatgagcaccactactgctgcattgtgcagcacgcggggctggcgcagcccctcagggtggagctggaatctccagccaagtcctccgtgctcgtggtgggaatcgtcatcggtgtcttgctactcacggcagcggctgtaggaggagctctgttgtggagaaggatgaggagtgggctgccagccccttggatctcccttcgtggagacgacaccggggtcctcctgcccaccccaggggaggcccaggatgctgatttgaaggatgtaaatgtgattccagccaccgcctgaccatccgccattccgactgctaaaagcgaatgtagtcaggcccctttcatgctgtgagacctcctggaacactggcatctctgagcctccagaaggggttctgggcctagttgtcctccctctggagccccgtcctgtggtctgcctcagtttcccctcctaatacatatggctgttttccacctcgataatataacacgagtttgggcccgaaaaa

SEQ ID NO: 21 - DNA, 1634 bp, Homo sapiens
ccctaagtgagaggaccaacagttccgacagcgagcgctccccagatctgggccacagcacgcagattccaagaaaggtggtgtatgaccagctcaatcagatcctggtgtcagatgcagccctcccagaaaatgtcattctggtgaacaccactgactggcagggccagtatgtggctgagctgctccaggaccagcggaagcctgtggtgtgcacctgctccaccgtggaggtccaggccgtgctgtccgccctgctcacccggatccagcgctactgcaactgcaactcttccatgccgaggccagtgaaggtggctgctgtgggaggccagagctacctgagctccatcctcaggttctttgtcaagtccctggccaacatgacctccgactggcttggctacatgcgcttcctcatcatccccctcggttctcaccctgtggccaaatacttggggtcagtcgacagtaaatacagtagttccttcctggattctggttggagagatctgttcagtcgctcggagccaccagtgtcagagcaactggacgtggcagggcgggtgatgcagtacgtcaacggggcagccacgacacaccagcttcccgtggccgaagccatgctgacttgccggcataagttccctgatgaagactcctatcagaagtttattcccttcattggcgtggtgaaggtgggtctggttgaagactctccctccacagcaggcgatggggacgattctcctgtggtcagccttactgtgccctccacatcaccaccctccagctcgggcctgagccgagacgccacggccacccctccctcctccccatctatgagcagcgccctggccatcgtggggagccctaatagcccatatggggacgtgattggcctccaggtggactactggctgggccaccccggggagcggaggagggaaggcgacaagagggacgccagctcgaagaacaccctcaagagtgtcttccgctcagtgcaggtgtcccgcctgccccatagtggggaggcccagctttctggcaccatggccatgactgtggtcaccaaagaaaagaacaagaaagttcccaccatcttcctgagcaagaaaccccgagaaaaggaggtggattctaagagccaggtcattgaaggcatcagccgcctcatctgttcttccccctccttaggccccagcctgggcccagacccatcctcccagccaggtttccctccagcaggctccttccctccctgtcacctccctctcaccaacccggggtctgagcccctcattcctgaccgtccgtgttctcaggagtggttgaggacacagggccccagcccagccctctgcaccccccagcccggccatctgcgccccacagcccctttggagcttttctcttgtcctctcactccttcccagaagtttttgcacagaacttcattttgaaagtgtttttctcattctccatacctcccccaagctctcctccagcccttcccagggctcagccctgctgtcctgagcgtctcctgggccagagagaggagatgggggtgggagggactgagttgatgttgggtttttcattcaataaattggtgatttcttaccgac

SEQ ID NO: 22 - DNA, 1264 bp, Homo sapiens
ggcacgaggggaggccggggcggggcgggcgcagccggcgctgagcttgcagggccgctcccctcacccgcccccttcgagtccccgggcttcgccccacccggcccgtgggggagtatctgtcctgccgccttcgcccacgccctgcactccgggaccgtccctgcgcgctctgggcgcaccatggcccgcggggctgcgctggcgctgctgctcttcggcctgctgggtgttctggtcgccgccccggatggtggtttcgatttatccgatgcccttcctgacaatgaaaacaagaaacccactgcaatccccaagaaacccagtgctggggatgactttgacttaggagatgctgttgttgatggagaaaatgacgacccacgaccaccgaacccacccaaaccgatgccaaatccaaaccccaaccaccctagttcctccggtagcttttcagatgctgaccttgcggatggcgtttcaggtggagaaggaaaaggaggcagtgatggtggaggcagccacaggaaagaaggggaagaggccgacgccccaggcgtgatccccgggattgtgggggctgtcgtggtcgccgtggctggagccatctctagcttcattgcttaccagaaaaagaagctatgcttcaaagaaaatgcagaacaaggggaggtggacatggagagccaccggaatgccaacgcagagccagctgttcagcgtactcttttagagaaatagaagattgtcggcagaaacagcccaggcgttggcagcagggttagaacagctgcctgaggctcctccctgaaggacacctgcctgagagcagagatggaggccttctgttcacggcggattctttgttttaatcttgcgatgtgctttgcttgttgctgggcggatgatgtttactaacgatgaattttacatccaaagggggataggcacttggacccccattctccaaggcccgggggggcggtttcccatgggatgtgaaaggctggccattattaagtccctgtaactcaaatgtcaaccccaccgaggcacccccccgtcccccagaatcttggctgtttacaaatcacgtgtccatcgagcacgtctgaaacccctggtagccccgacttctttttaattaaaataaggtaagcccttcaatttgtttcttcaatatttctttcatttgtagggatatttgtttttcatatcagactaataaaaagaaattagaaaccaaaaaaaaaaaaaaaaaaaa

SEQ ID NO: 23 - DNA, 1567 bp, Homo sapiens
tcctgggcctctcaaagtctgagccccgctccgctgatgcctgtctgcagaatccgcaccaaccagcaccatgcccatgactctggggtactgggacatccgtgggctggcccacgccatccgcttgctcctggaatacacagactcaagctatgtggaaaagaagtacacgctgggggacgctcctgactatgacagaagccagtggctgaatgaaaaattcaagctgggcctggactttcccaatctgccctacttgattgatggggctcacaagatcacccagagcaatgccatcctgcgctacattgcccgcaagcacaacctgtgtggggagacagaagaggagaagattcgtgtggacattttggagaaccaggttatggataaccacatggagctggtcagactgtgctatgacccagattttgagaaactgaagccaaaatacttggaggaactccctgaaaagctaaagctctactcagagtttctggggaagcggccatggtttgcaggagacaagatcacctttgtggatttccttgcctatgatgtccttgacatgaagcgtatatttgagcccaagtgcttggacgccttcctaaacttgaaggacttcatctcccgctttgagggtttgaagaagatctctgcctacatgaagtccagccaattcctccgaggtcttttgtttggaaagtcagctacatggaacagcaaatagggcccagtgatgccagaagatgggagggaggagccaaccttgctgcctgcgaccctggaggacagcctgactccctggacctgccttcttcctttttccttctttctactctcttctcttccccaaggcctcattggcttcctttcttctaacatcatccctccccgcatcgaggctctttaaagcttcagctccccactgtcctccatcaaagtccccctcctaacgtcttcctttccctgcactaacgccaacctgactgcttttcctgtcagtgcttttctcttctttgagaagccagactgatctctgagctccctagcactgtcctcaaagaccatctgtatgccctgctccctttgctgggtccctaccccagctccgtgtgatgcccagtaaagcctgaaccatgcctgccatgtcttgtcttattccctgaggctcccttgactcaggactgtgctcgaattgtgggtggttttttgtcttctgttgtccacagccagagcttagtggatgggtgtgtgtgtgtgtgtgttgggggtggtgatcaggcaggttcataaatttccttggtcatttctgccctctagccacatccctctgttcctcactgtggggattactacagaaaggtgctctgtgccaagttcctcactcattcgcgctcctgtaggccgtctagaactggcatggttcaaagaggggctaggctgatggggaagggggctgagcagctcccaggcagactgccttctttcaccctgtcctgatagacttccctgatctagatatccttcgtcatgacacttctcaataaaacgtatcccaccgtattgt

SEQ ID NO: 24 - DNA, 900 bp, Homo sapiens
ggcacgagcgtgcgtgctggcgtgcgttcactttcagcctggtgtggggcttgtaaacatataacataaaaatggcttccaaaagagctctggtcatcctggctaaaggagcagaggaaatggagacggtcatccctgtagatgtcatgaggcgagctgggattaaggtcaccgttgcaggcctggctggaaaagacccagtacagtgtagccgtgatgtggtcatttgtcctgatgccagccttgaagatgcaaaaaaagagggaccatatgatgtggtggttctaccaggaggtaatctgggcgcacagaatttatctgagtctgctgctgtgaaggagatactgaaggagcaggaaaaccggaagggcctgatagccgccatctgtgcaggtcctactgctctgttggctcatgaaataggttttggaagtaaagttacaacacaccctcttgctaaagacaaaatgatgaatggaggtcattacacctactctgagaatcgtgtggaaaaagacggcctgattcttacaagccgggggcctgggaccagcttcgagtttgcgcttgcaattgttgaagccctgaatggcaaggaggtggcggctcaagtgaaggctccacttgttcttaaagactagagcagcgaactgcgacgatcacttagagaaacaggccgttaggaatccattctcactgtgttcgctctaaacaaaacagtggtaggttaatgtgttcagaagtcgctgtccttactacttttgcggaagtatggaagtcacaactacacagagatttctcagcctacaaattgtgtctatacatttctaagccttgtttgcagaataaacagggcatttagcaaaaaaaaaaaaaaaaaaaaaaaaaaaaaaaaaaaaa

SEQ ID NO: 25 - DNA, 647 bp, Homo sapiens
gctcactgagcaccgtcccagcatccggacaccacagcggcccttcgctccacgcagaaaaccacacttctcataccttcactcaacacttccttccccaaagccagaagatgcacaaggaggaacatgaggtggctgtgctgggggcaccccccagcaccatccttccaaggtccaccgtgattaacatccacagcgagacctccgtgcccgaccatgtcgtctggtccctgttcaacaccctcttcttgaactggtgctgtctgggcttcatagcattcgcctactccgtaaagtctagggacaggaagatggttggcgacgtgaccggggcccaggcctatgcctccaccgccaagtgcctgaacatctgggccctgattctgggcatcctcatgaccattggattcatcctgttactggtattcggctctgtaacagtctaccatattatgttacagataatacaggaaaaacggggttactagtagccgcccatagcctgcaacctttgcactccactgtgcaatgctggccctgcacgctggggctgttgcccctgcccccttggtcctgcccctagatacagcagtttatacccacacacctgtctacagtgtcattcaataaagtgcacgtgcttgtga

SEQ ID NO: 26 - DNA, 2850 bp, Homo sapiens
aaaagaccaggtaattttaacatttgtggaatcacaaatgtaaattcataagaagctctaattaaaaaaaaaaagtctgaagtatatgagcataacaacttaggagtgtgtctacatacttaacttttgaagttttttggcaactttatatactttttttaaatttacaagtctacttaaagacttcttataccccaaatgattaagttaattttagaggtcacctttctcacagcagtgtcacttgaaatttagtagggaaggatattgcagtatttttcagtttccttagcacagcaccacagaaagcagcttattccttttgagtggcagacactcgacggtgcctgcccaactttcctcctgagtggcaagcagatgagtctcagtaattcatactgaaccaaaatgccacatacactaggggcagtcagaaactggctgagaaatcccccgcctcattcgcccctctgctcccaggaactagagtccagttaaagcccctatgcgaaaggccgaattccaccccagggtttgttataacagtggccagtctgaaccccatttgctcgtgctcaaaacttgattcccacttgaaagccttccgggcgcgctgcctcgttgccccgcccctttggcaggagagaggcagtgggcgaggccgggctggggccccgcctcccactcacctgccggtgcctgaaattatgtgcggccccgcgggctgctttccgaggtcagagtgccctgctgctgtctcagaggcatctgttctgcaaatcttaggaagaaaaatgtccctagtagcaaacgggtgtcttctgtgcataaataagtacaacacaattctccgaaagttcgggtaaaaagagatgcggtagcagctgccctgtgtgaagctgtctaccccgcatctctcaggcgctaagctcagtttttgtttttgtttttgtttttttaaagaaaagatgtataattgcaggaatttttttttatttttttattttccatcattctatatatgtgatggtgaaagatatgcctggaaaagttttgttttgaaaagtttattttctgcttcgtcttcagttggcaaaagctctcaattctttagcttccagtttcttttctctctttttctttgttaggtaattaaaggtatgtaaacaaattatctcatgtagcaggggattttcatgttgagaggaatcttccgtgtgagttgtttggtcacacaaataaccctttctcaattttaggagtttggattgtcaaatgtaggtttttctcaaagggggcatataactacatattgactgccaagaactatgactgtagcactaatcagcacacatagagccacacaattatttaatttctaactctctgtggtccctagaaaaattccgttgatgtgcttaggttaaagttctgaagatacccgttgtacccttacttgaaagtttctaatcttaagttttatgaaatgcaataatatgtatcagctagcaatatttctgtgatcaccaacaactctcagtttgatcttaaagtctgaataataaaacaaatcccagcagtaatacatttcttaaacctcacagtgcatgatatatcttttcattctgatcctgtgtttgcaaaaatatacacatgtatatcatagttcctcactttttattcatttgttttcctattacctgtagtaaatatattagttagtacatggaatttatagcatcagctacccccaggaacagcacctgacaggcgggggattttttttcaagttgttctacatttgcataaattatttctattattattcatgtatgttatttatttctgaatcacactagtcctgtgaaagtacaactgaaggcagaaagtgttaggattttgcatctaatgttcattatcatggtattgatggacctaagaaaataaaaattagactaagcccccaaataagctgcatgcatttgtaacatgattagtagatttgaatatatagatgtagtattttgggtatctaggtgttttatcattatgtaaaggaattaaagtaaaggactttgtagttgtttttattaaatatgcatatagtagagtgcaaaaatatagcaaaaataaaaactaaaggtagaaaagcattttagatatgccttaatttagaaactgtgccaggtggccctcggaatagatgccaggcagagaccagtgcctgggtggtgcctcctcttgtctgccctcatgaagaagcttccctcacgtgatgtagtgccctcgtaggtgtcatgtggagtagtgggaacaggcagtactgttgagaggagagcagtgtgagagtttttctgtagaagcagaactgtcagcttgtgccttgaggcttccagaacgtgtcagatggagaagtccaagtttccatgcttcaggcaacttagctgtgtacagaagcaatccagtgtggtaataaaaagcaaggattgcctgtataatttattataaaataaaagggattttaacaaccaacaattcccaacacctcaaaagcttgttgcattttttggtatttgaggtttttatctgaaggttaaagggcaagtgtttggtatagaagagcagtatgtgttaagaaaagaaaaatattggttcgcgtagagtgcaaattagaactagaaagttttatacgattatcattttgagatgtgttaaagtaggttttcactgtaaaatgtattagtgtttctgcattgccatagggcctggttaaaactttctcttaggtttcaggaagactgtcacatacagtaagcttttttccttctgacttataatagaaaatgtttt

SEQ ID NO: 27 - DNA, 3579 bp, Homo sapiens
agtttcctcggcagcggtaggcgagagcacgcggaggagcgtgcgcgggggccccgggagacggcggcggtggcggcgcgggcagagcaaggacgcggcggatcccactcgcacagcagcgcactcggtgccccgcgcagggtcgcgatgctgcccggtttggcactgctcctgctggccgcctggacggctcgggcgctggaggtacccactgatggtaatgctggcctgctggctgaaccccagattgccatgttctgtggcagactgaacatgcacatgaatgtccagaatgggaagtgggattcagatccatcagggaccaaaacctgcattgataccaaggaaggcatcctgcagtattgccaagaagtctaccctgaactgcagatcaccaatgtggtagaagccaaccaaccagtgaccatccagaactggtgcaagcggggccgcaagcagtgcaagacccatccccactttgtgattccctaccgctgcttagttggtgagtttgtaagtgatgcccttctcgttcctgacaagtgcaaattcttacaccaggagaggatggatgtttgcgaaactcatcttcactggcacaccgtcgccaaagagacatgcagtgagaagagtaccaacttgcatgactacggcatgttgctgccctgcggaattgacaagttccgaggggtagagtttgtgtgttgcccactggctgaagaaagtgacaatgtggattctgctgatgcggaggaggatgactcggatgtctggtggggcggagcagacacagactatgcagatgggagtgaagacaaagtagtagaagtagcagaggaggaagaagtggctgaggtggaagaagaagaagccgatgatgacgaggacgatgaggatggtgatgaggtagaggaagaggctgaggaaccctacgaagaagccacagagagaaccaccagcattgccaccaccaccaccaccaccacagagtctgtggaagaggtggttcgagaggtgtgctctgaacaagccgagacggggccgtgccgagcaatgatctcccgctggtactttgatgtgactgaagggaagtgtgccccattcttttacggcggatgtggcggcaaccggaacaactttgacacagaagagtactgcatggccgtgtgtggcagcgccatgtcccaaagtttactcaagactacccaggaacctcttgcccgagatcctgttaaacttcctacaacagcagccagtacccctgatgccgttgacaagtatctcgagacacctggggatgagaatgaacatgcccatttccagaaagccaaagagaggcttgaggccaagcaccgagagagaatgtcccaggtcatgagagaatgggaagaggcagaacgtcaagcaaagaacttgcctaaagctgataagaaggcagttatccagcatttccaggagaaagtggaatctttggaacaggaagcagccaacgagagacagcagctggtggagacacacatggccagagtggaagccatgctcaatgaccgccgccgcctggccctggagaactacatcaccgctctgcaggctgttcctcctcggcctcgtcacgtgttcaatatgctaaagaagtatgtccgcgcagaacagaaggacagacagcacaccctaaagcatttcgagcatgtgcgcatggtggatcccaagaaagccgctcagatccggtcccaggttatgacacacctccgtgtgatttatgagcgcatgaatcagtctctctccctgctctacaacgtgcctgcagtggccgaggagattcaggatgaagttgatgagctgcttcagaaagagcaaaactattcagatgacgtcttggccaacatgattagtgaaccaaggatcagttacggaaacgatgctctcatgccatctttgaccgaaacgaaaaccaccgtggagctccttcccgtgaatggagagttcagcctggacgatctccagccgtggcattcttttggggctgactctgtgccagccaacacagaaaacgaagttgagcctgttgatgcccgccctgctgccgaccgaggactgaccactcgaccaggttctgggttgacaaatatcaagacggaggagatctctgaagtgaagatggatgcagaattccgacatgactcaggatatgaagttcatcatcaaaaattggtgttctttgcagaagatgtgggttcaaacaaaggtgcaatcattggactcatggtgggcggtgttgtcatagcgacagtgatcgtcatcaccttggtgatgctgaagaagaaacagtacacatccattcatcatggtgtggtggaggttgacgccgctgtcaccccagaggagcgccacctgtccaagatgcagcagaacggctacgaaaatccaacctacaagttctttgagcagatgcagaactagacccccgccacagcagcctctgaagttggacagcaaaaccattgcttcactacccatcggtgtccatttatagaataatgtgggaagaaacaaacccgttttatgatttactcattatcgccttttgacagctgtgctgtaacacaagtagatgcctgaacttgaattaatccacacatcagtaatgtattctatctctctttacattttggtctctatactacattattaatgggttttgtgtactgtaaagaatttagctgtatcaaactagtgcatgaatagattctctcctgattatttatcacatagccccttagccagttgtatattattcttgtggtttgtgacccaattaagtcctactttacatatgctttaagaatcgatgggggatgcttcatgtgaacgtgggagttcagctgcttctcttgcctaagtattcctttcctgatcactatgcattttaaagttaaacatttttaagtatttcagatgctttagagagattttttttccatgactgcattttactgtacagattgctgcttctgctatatttgtgatataggaattaagaggatacacacgtttgtttcttcgtgcctgttttatgtgcacacattaggcattgagacttcaagcttttctttttttgtccacgtatctttgggtctttgataaagaaaagaatccctgttcattgtaagcacttttacggggcgggtggggaggggtgctctgctggtcttcaattaccaagaattctccaaaacaattttctgcaggatgattgtacagaatcattgcttatgacatgatcgctttctacactgtattacataaataaattaaataaaataaccccgggcaagacttttctttgaaggatgactacagacattaaataatcgaagtaattttgggtggggagaagaggcagattcaattttctttaaccagtctgaagtttcatttatgatacaaaagaagatgaaaatggaagtggcaatataaggggatgaggaaggcatgcctggacaaacccttcttttaagatgtgtcttcaatttgtataaaatggtgttttcatgtaaataaatacattcttggaggagc

SEQ ID NO: 28 - DNA, 1433 bp, Homo sapiens
attcggggcgagggaggaggaagaagcggaggaggcggctcccgctcgcagggccgtgcacctgcccgcccgcccgctcgctcgctcgcccgccgcgccgcgctgccgaccgccagcatgctgccgagagtgggctgccccgcgctgccgctgccgccgccgccgctgctgccgctgctgccgctgctgctgctgctactgggcgcgagtggcggcggcggcggggcgcgcgcggaggtgctgttccgctgcccgccctgcacacccgagcgcctggccgcctgcgggcccccgccggttgcgccgcccgccgcggtggccgcagtggccggaggcgcccgcatgccatgcgcggagctcgtccgggagccgggctgcggctgctgctcggtgtgcgcccggctggagggcgaggcgtgcggcgtctacaccccgcgctgcggccaggggctgcgctgctatccccacccgggctccgagctgcccctgcaggcgctggtcatgggcgagggcacttgtgagaagcgccgggacgccgagtatggcgccagcccggagcaggttgcagacaatggcgatgaccactcagaaggaggcctggtggagaaccacgtggacagcaccatgaacatgttgggcgggggaggcagtgctggccggaagcccctcaagtcgggtatgaaggagctggccgtgttccgggagaaggtcactgagcagcaccggcagatgggcaagggtggcaagcatcaccttggcctggaggagcccaagaagctgcgaccaccccctgccaggactccctgccaacaggaactggaccaggtcctggagcggatctccaccatgcgccttccggatgagcggggccctctggagcacctctactccctgcacatccccaactgtgacaagcatggcctgtacaacctcaaacagtgcaagatgtctctgaacgggcagcgtggggagtgctggtgtgtgaaccccaacaccgggaagctgatccagggagcccccaccatccggggggaccccgagtgtcatctcttctacaatgagcagcaggaggcttgcggggtgcacacccagcggatgcagtagaccgcagccagccggtgcctggcgcccctgccccccgcccctctccaaacaccggcagaaaacggagagtgcttgggtggtgggtgctggaggattttccagttctgacacacgtatttatatttggaaagagaccagcaccgagctcggcacctccccggcctctctcttcccagctgcagatgccacacctgctccttcttgctttccccgggggaggaagggggttgtggtcggggagctggggtacaggtttggggagggggaagagaaatttttatttttgaacccctgtgtcccttttgcataagattaaaggaaggaaaagt

SEQ ID NO: 29 - DNA, 2370 bp, Homo sapiens
cctggaactctagcacgccgagtgaacttgaatctttggctatttaaggaggactgggtttgttgtgaagttgcggtgatccagcgcagagccccgtcctgattgatcgcatcgcggggctcagatgactgtaaaatgaatagatgaaattcttgcttctcgaagattttcttgggcatctcccggaaagtgcgttttaaggcgaagtcatgatgtattctcccatctgtctcactcaggatgaatttcacccattcatggaagcacttcttccacatgtccgtgcaattgcctatacttggttcaacctgcaggctcgaaaacgcaagtactttaaaaagcatgagaagcgaatgtcaaaggatgaagaaagagcagtcaaagatgagcttctcagtgaaaagcctgaaatcaaacagaagtgggcatccaggctccttgccaaactgcgcaaagatattcgccaggagtatcgagaggactttgtgctcaccgtgactggcaagaagcacccgtgctgtgtcttatccaatcccgaccagaagggtaagattaggagaatcgactgcctgcgacaggcagacaaagtctggcgtctggatctagtcatggtgatcctgttcaaaggcatccccttggaaagtaccgatggagagcggctcatgaaatccccacattgcacaaacccagcactttgtgtccagccacatcatatcacagtatcagttaaggagcttgatttgtttttggcatactacgtgcaggagcaagattctggacaatcaggaagtccaagccacaatgatcctgccaagaatcctccaggttaccttgaggatagttttgtaaaatctggagtcttcaatgtatcagaacttgtaagagtatccagaacgcccataacccagggaactggagtcaacttcccaattggagaaatcccaagccaaccatactatcatgacatgaactcgggggtcaatcttcagaggtctctgtcttctccaccaagcagcaaaagacccaaaactatatccatagaygaaaatatggaaccaagtcctacaggagacttttacccctctccaagttcaccagctgctggaagtcgaacatggcacgaaagagatcaagatatgtcttctccgactactatgaagaagcctgaaaagccattgttcagctctgcatctccacaggattcttccccaagactgagcactttcccccagcaccaccatcccggaatacctggagttgcacacagtgtcatctcaactcgaactccacctccaccttcaccgttgccatttccaacacaagctatccttcctccagccccatcgagctacttttctcatccaacaatcagatatcctccccacctgaatcctcaggatactctgaagaactatgtaccttcttatgacccatccagtccacaaaccagccagtcctggtacctgggctagcttggttcctttccaagtgtcaaataggacacccatcttaccggccaatgtccaaaattacggtttgaacataattggagaacctttccttcaagcagaaacaagcaactgagggaaaaagaaacacaacaatagtttaagaaattttttttttaaataaaaaaaaggaaaagaggaagactggacaaaacaacacaaaggcagaaaggaaagaaactgaagaaagaagataatagaccagcaattgcagcacttacaatcactaattcccttaaggttaaactgtaatgacataaaaagggtcgatgatatttcactgatggtagatcgcagcccctgcaacgtagcctttgttacatgaagtccgctgggaaatagatgttctgtctctatgacaatatattttaactgactttctagatgccttaatatttgcatgataagctagttttattggtttagtattcttgttgtttacgcatggaatcactattcctggttatctcaccaacgaaggctaggaggcggcgtcagagatgctgggtgacagagccatgagccagccattttataagcactctgatttctaaaagttaaaaaaaatatatgaaatctctgtagcctttagttatcagtacagatttattaaatttcggcccttaacccagccttttccagtgtgtaacccagtttgaaatcttaaaaaaagaaaaaatgaaaaaaaaaggaaaaaaagaaaaaaggaaaaaaacagtttgaacacaaaggctctatggaagaaatgcctctatgtaggtgaagtgttctctctgcatgcaacagtaaaaattaatataatattttccccacaaaagaaacacttaacagagggcaagtgcaatttattaaatttatattc

SEQ ID NO: 30 - DNA, 2699 bp, Homo sapiens
gcccagcgggggcgggactggaacggagccgtgcggccccgcgcgctcgcagtctgtctcccgccgtccccacgcacgcgtcccggctcacgcgtccgcccgcccgcccccgcttgtgccgcccctaccagagacccccaggagcaggatgtccttccagggcaagaaaagcatcccccggatcacgagtgaccgccttctgatcagaggtgggaggatcgtgaatgacgaccagtccttttacgctgatgtgcacgtggaagatggcttgataaaacaaatcggagaaaacctcatcgtccctgggggcatcaagaccattgacgcccacggcctgatggtccttcctggtggcgttgacgtccacacaaggctgcagatgcctgtcctgggcatgacaccggctgacgacttctgtcagggcaccaaggcagcgctagcaggaggaaccaccatgatcttggaccacgtcttccccgacacgggtgtgagcctgctggcggcctacgagcggtggcgggagcgggcggacagcgcggcctgctgcgactactccctgcacgtggacatcacccgatggcatgagagcatcaaggaggagctggaggccctggtcaaggagaagggtgtgaactccttcctggtcttcatggcatacaaggaccggtgccagtgcagcgacagccagatgtacgagatcttcagcatcatccgggacctgggggccttggcccaggtgcacgctgagaacggggacatcgtggaggaggagcagaagcggttgctggagctcggcatcactggccccgagggccacgtgctcagccaccccgaggaggtggaggctgaggcggtgtaccgagctgtcaccatcgccaagcaggcaaactgcccgctgtacgtcaccaaggtgatgagcaagggggcggccgacgccatcgctcaggccaagcgcagaggggtggtcgtgtttggggagcccatcaccgccagcctgggcaccgacggttcacactactggagcaagaactgggccaaggccgcagccttcgtcacatcaccccctgtcaacccagaccccaccacggcagaccacctcacctgcttgctgtccagcggggacctccaggtgacaggcagcgcccactgcaccttcaccactgcccagaaggctgtgggcaaggacaacttcgcgctgatccccgagggcaccaacggcattgaggagcgcatgtcgatggtctgggagaaatgtgtggcctctgggaagatggacgagaatgagttcgtcgcggtgaccagtacaaatgctgccaaaatcttcaatttttacccaaggaaggggcgagtggctgtgggctctgacgctgacctggtcatatggaaccccaaggccaccaagatcatctctgccaagacccacaatctgaacgtggagtacaacatcttcgagggagtggagtgccggggagcgcctgccgtggtcataagtcagggccgagtggcgctggaggacgggaagatgtttgtcaccccgggggcgggccgcttcgtccctcggaaaacattcccggactttgtctacaagaggatcaaagctcgcaacaggctggcggagatccacggtgtgccccgtgggctgtatgacgggcccgtccacgaggtgatggtgcctgccaagccagggagtggcgctccggcccgcgcgtcctgcccaggcaagatctccgtgcctcctgtgcgcaacctacatcagtcggggttcagcctatctgggtctcaggctgatgaccacatcgcccgacgcacagcacagaagatcatggcaccacctggcggccgctccaacatcacctctctctcctagacgcccaggaccggccctgtgagccgtgctggccccacccgaggccgcgggggccccagggcactcgcccccctccttagcattttcttttgtagaagtttctcgaaggtgcttggcggtcttgccttccccctccccacaggctctccttgtggggtcccaggtcctgctgccaagagcccctcaagagaagggctgaacctggggagatgtcactgccagggtgaggtggagccacatggcagggacaatgccggcagcctgagcccaggcaccccagtgcccgctgggcccagcctggggacagggaacctgccgggctcacagtgtgggagcagctggacaccaggcttcttggtgaaccggcgaggggccgagtcccgcctggtgggcatttgctgccgcctccccaccaccagtcactgcctcgcagagccctacactcccgcagccgctcctcagaggcctgtgcccatcgcaggcctgggaggaaagtgggcgcagagccctcctgctcacacagctgctgagacttcagggacccatcagaacttggtgcagcacagccccgcccgtggagggtcccttttacgcaccccaaggcccacacctaagcttccatgtagccctcatccagggaagttttgcgatcctttaggaagacactgtcctcttattacagattgtgtatttccgtaggcttcttagtagcagctttgtacactgaggacactgtagccaggaacctgtgcatgccacccaccgcctggacaggcagtcatcctgcctctgatgtgaatcaggcccattaaagacgtctgggtttgaagcc

SEQ ID NO: 31 - DNA, 4122 bp, Homo sapiens
tttgtcatcagctcgctctccattggcggggagcggagagcagcgaagaagggggtggggaggggaggggaagggaagggggtggaaactgcctggagccgtttctccgcgccgctgttggtgctgccgctgcctcctcctcctccgccgccgccgccgccgccgccgcctcctccggctcttcgctcggcccctctccgcctccatgtgccggatagcgggagcgctgcggaccctgctgccgctgctggcggccctgcttcaggcgtctgtagaggcttctggtgaaatcgcattatgcaagactggatttcctgaagatgtttacagtgcagtcttatcgaaggatgtgcatgaaggacagcctcttctcaatgtgaagtttagcaactgcaatggaaaaagaaaagtacaatatgagagcagtgagcctgcagattttaaggtggatgaagatggcatggtgtatgccgtgagaagctttccactctcttctgagcatgccaagttcctgatatatgcccaagacaaagagacccaggaaaagtggcaagtggcagtaaaattgagcctgaagccaaccttaactgaggagtcagtgaaggagtcagcagaagttgaagaaatagtgttcccaagacaattcagtaagcacagtggccacctacaaaggcagaagagagactgggtcatccctccaatcaacttgccagaaaactccaggggaccttttcctcaagagcttgtcaggatcaggtctgatagagataaaaacctttcactgcggtacagtgtaactgggccaggagctgaccagcctccaactggtatcttcattatcaaccccatctcgggtcagctgtcggtgacaaagcccctggatcgcgagcagatagcccggtttcatttgagggcacatgcagtagatattaatggaaatcaagtggagaaccccattgacattgtcatcaatgttattgacatgaatgacaacagacctgagttcttacaccaggtttggaatgggacagttcctgagggatcaaagcctggaacatatgtgatgaccgtaacagcaattgatgctgacgatcccaatgccctcaatgggatgttgaggtacagaatcgtgtctcaggctccaagcaccccttcacccaacatgtttacaatcaacaatgagactggtgacatcatcacagtggcagctggacttgatcgagaaaaagtgcaacagtatacgttaataattcaagctacagacatggaaggcaatcccacatatggcctttcaaacacagccacggccgtcatcacagtgacagatgtcaatgacaatcctccagagtttactgccatgacgttttatggtgaagttcctgagaacagggtagacatcatagtagctaatctaactgtgaccgataaggatcaaccccatacaccagcctggaacgcagtgtacagaatcagtggcggagatcctactggacggttcgccatccagaccgacccaaacagcaacgacgggttagtcaccgtggtcaaaccaatcgactttgaaacaaataggatgtttgtccttactgttgctgcagaaaatcaagtgccattagccaagggaattcagcacccgcctcagtcaactgcaaccgtgtctgttacagttattgacgtaaatgaaaacccttattttgcccccaatcctaagatcattcgccaagaagaagggcttcatgccggtaccatgttgacaacattcactgctcaggacccagatcgatatatgcagcaaaatattagatacactaaattatctgatcctgccaattggctaaaaatagatcctgtgaatggacaaataactacaattgctgttttggaccgagaatcaccaaatgtgaaaaacaatatatataatgctactttccttgcttctgacaatggaattcctcctatgagtggaacaggaacgctgcagatctatttacttgatattaatgacaatgcccctcaagtgttacctcaagaggcagagacttgcgaaactccagaccccaattcaattaatattacagcacttgattatgacattgatccaaatgctggaccatttgcttttgatcttcctttatctccagtgactattaagagaaattggaccatcactcggcttaatggtgattttgctcagcttaatttaaagataaaatttcttgaagctggtatctatgaagttcccatcataatcacagattcgggtaatcctcccaaatcaaatatttccatcctgcgcgtgaaggtttgccagtgtgactccaacggggactgcacagatgtggacaggattgtgggtgcggggcttggcaccggtgccatcattgccatcctgctctgcatcatcatcctgcttatccttgtgctgatgtttgtggtatggatgaaacgccgggataaagaacgccaggccaaacaacttttaattgatccagaagatgatgtaagagataatattttaaaatatgatgaagaaggtggaggagaagaagaccaggactatgacttgagccagctgcagcagcctgacactgtggagcctgatgccatcaagcctgtgggaatccgacgaatggatgaaagacccatccacgctgagccccagtatccggtccgatctgcagccccacaccctggagacattggggacttcattaatgagggccttaaagcggctgacaatgaccccacagctccaccatatgactccctgttagtgtttgactatgaaggcagtggctccactgctgggtccttgagctcccttaattcctcaagtagtggtggtgagcaggactatgattacctgaacgactgggggccacggttcaagaaacttgctgacatgtatggtggaggtgatgactgaacttcagggtgaacttggtttttggacaagtacaaacaatttcaactgatattcccaaaaagcattcagaagctaggctttaactttgtagtctactagcacagtgcttgctggaggctttggcataggctgcaaaccaatttgggctcagagggaatatcagtgatccatactgtttggaaaaacactgagctcagttacacttgaattttacagtacagaagcactgggattttatgtgcctttttgtacctttttcagattggaattagttttctgtttaaggctttaatggtactgatttctgaaacgataagtaaaagacaaaatattttgtggtgggagcagtaagttaaaccatgatatgcttcaacacgcttttgttacattgcatttgcttttattaaaatacaaaattaaacaaacaaaaaaactcatggagcgattttattatcttgggggatgagaccatgagattggaaaatgtacattacttctagttttagactttagtttgttttttttttttcactaaaatcttaaaacttactcagctggttgcaaataaagggagttttcatatcaccaatttgtagcaaaattgaattttttcataaactagaatgttagacacattttggtcttaatccatgtacacttttttatttctgtatttttccacttcactgtaaaaatagtatgtgtacataatgttttattggcatagtctatggagaagtgcagaaacttcagaacatgtgtatgtattatttggactatggattcaggttttttgcatgtttatatctttcgttatggataaagtatttacaaaacagtgacatttgattcaattgttgagctgtagttagaatactcaatttttaatttttttaatttttttattttttattttctttttggtttggggagggagaaaagttcttagcacaaatgttttacataatttgtaccaaaaaaaaaaaaaaggaaaggaaagaaaggggtggcctgacactggtggcactactaagtgtgtgttttttaaaaaaaaaaatggaaaaaaaaaagcttttaaactggagagacttctgacaacagctttgcctctgtattgtgtaccagaatataaatgatacacctctgaccccagcgttctgaataaaatgctaattttggaaaaaaaaaaaaaaaaa

SEQ ID NO: 32 - DNA, 1653 bp, Homo sapiens
agtcagcacgggggtgctggaagagatcgggaataatagcgcagaccaatgagcctagggagatgctttcatcgtctctccttccctcaagtgttctggaacctatcatttgaattagccgagtcaggcaggagggggcggggaatccttccgcccttcttaggaggggctgcattgcagggggagagtgaactgacagactcagtcactgaagagggaaaaggagtgagaagacaaagccgtcaaagccccaacagctttgtatttctccagcccggcgcagaccccggagctcccgaggcactccctccatctttggaacacgccagtaattgattgataacaggaagctatgagggaccctgtgagtagccagtacagttcctttcttttctggaggatgcccatcccagaactggatctgtcggagctggaaggcctgggtctgtcagatacagccacctacaaggtcaaagacagcagcgttggcaaaatgatcgggcaagcaactgcagcagaccaggagaaaaaccctgaaggtgatggcctccttgagtacagcaccttcaacttctggagagctcccattgccagcatccactccttcgaactggacttgctctaaggccaagacttctctctcccatcaccttgccctcattgtcttccctctcaagccccttcctttccactcctttcccattttaatcttgttctctccctactgtgttggtggtgctgatgaatctgccagagttgagttctatgtatttatttatctatctgtctactccatttctctcaaaagccctcaagtcacaaagtaaatggttcaagcaatggagtactgggtcacagggattcctcctttcccccccaaatattaactccagaaactaggcctgactggggacacctgagagtagtatagtagtgcaaaatggaagactgatttttgactctattataatcagcttcagagattccttaaaccttcctaatttcctgctccagggcagtaaacacaaatatttcttcaaggggtgatgaaaacctcggaagttttaatttgaggttatctgctacgaaacagtatttctaaaaggctaaagtgataagtctcttgcttttttttgatcctgctcttatattcttttttttcctcagagaaatcaggagggtagttagaggtataaaacaggaggaaatattatggaaaatgaaaatagggaaaataattgaatcattttagaagtagctaatttcttttctcaaaagagtgtcccttcttcacacctactcactttacaactttgctcctaactgtgggttgaaaactctagctaaagaaagttatcaaatcttaacatgcattcctactattatgatagtttttaaggtttcaattcaatcttctgaacggcataagtcctattttagccttacctcctgcatttgcaatacgtaatactgatcagtgggcacagttcttcagctacattgagaccctgaaatgaacaattatattctgactcgacatcttgtccccaatccttccaaaaatattgatggtgatttgtgctaccatttactcgtttatttaataaagacattcaatcccagaaaaaaaaaaaaaaaaaaaaaaaaaaaaaa

SEQ ID NO: 33 - DNA, 2928 bp, Homo sapiens
ccgatccgggcggtgctggcagccggagcggcggcgggcgggccgagcagccggggcagccgcgcgtgggcatccacgggcgccgagcctccgtccgtgtctctatccctcccgggcctttgtcagcgcgcccgctgggagcggggccgagagcgccggttccagtcagacagccccgcaggtcagcggccgggccgagggcgccagagggggccatgtcgtaccagggcaagaagagcatcccgcacatcacgagtgaccgactcctcatcaaaggtggacggatcatcaacgatgaccaatccctttatgctgacgtctacctggaggatggacttatcaaacaaataggagagaacttaatcgttcctggtggagtgaagaccattgaagccaacgggcggatggttattcccggaggtattgatgtcaacacgtacctgcagaagccctcccaggggatgactgcggctgatgacttcttccaagggaccagggcggcactggtgggcgggaccacgatgatcattgaccatgttgttcctgaacctgggtccagcctactgacctctttcgagaagtggcacgaagcagctgacaccaaatcctgctgtgattactccctccacgtggacatcacaagctggtacgatggcgttcgggaggagctggaggtgctggtgcaggacaaaggcgtcaattccttccaagtctacatggcctataaggatgtctaccaaatgtccgacagccagctctatgaagcctttaccttccttaagggcctgggagctgtgatcttggtccatgcagaaaatggagatttgatagctcaggaacaaaagcggatcctggagatgggcatcacgggtcccgagggccatgccctgagcagacctgaagagctggaggccgaggcggtgttccgggccatcaccattgcgggccggatcaactgccctgtgtacatcaccaaggtcatgagcaagagtgcagccgacatcatcgctctggccaggaagaaagggcccctagtttttggagagcccattgccgccagcctggggaccgatggcacccattactggagcaagaactgggccaaggctgcggcgttcgtgacttcccctcccctgagcccggaccctaccacgcccgactacttgacctccctactggcctgtggggacttgcaggtcacaggcagcggccactgtccctacagcactgcccagaaggcggtgggcaaggacaactttaccctgatccccgagggtgtcaacgggatagaggagcggatgacggtcgtctgggacaaggcggtggctactggcaaaatggatgagaaccagtttgtcgctgtcaccagcaccaatgcagccaagatctttaacctgtacccaaggaaagggcggattgccgtgggctcggatgccgacgtggtcatctgggaccccgacaagttgaagaccataacagccaaaagtcacaagtcggcggtggagtacaacatcttcgagggtatggagtgccacggctccccactagtggtcatcagccagggcaagatcgtctttgaagacggaaacatcaacgtcaacaagggcatgggccgcttcattccgcggaaggcgttcccggagcacctgtaccagcgcgtcaaaatcaggaataaggtttttggattgcaaggggtttccaggggcatgtatgacggtcctgtgtacgaggtaccagctacacccaaatatgcaactcccgctccttcagccaaatcttcgccttctaaacaccagcccccacccatcagaaacctccaccagtccaacttcagcttatcaggtgcccagatagatgacaacaatcccaggcgcaccggccaccgcatcgtggcgccccctggtggccgctccaacatcaccagcctcggttgaacgtggatgcgcggaggagctagcctgaaggattctgggaatcatgtccatcccttttcctgtcagtgtttttgaaacccacagttttagttggtgctgatggagggagggggaagtcgaaggatgctctttcccttttctgtttaggaagaagtggtactagtgtggtgtgtttgcttggaaattccttgccccacagttgtgttcatgctgaatccacctcggagcatggtgttttcattcccccttcctagtgaaccacaggttttagcattgtcttgttctgtcccttccacttctaactccactggctccatgattctctgagtggtggttcctttgcaccctgtagatgttctaggatagttgatgcatgttactaaattacgtatgcaagtctgtgagtgcgtctgaggggacatcgccaaggactgactgagacacgatgccgagacctcaagccctgaggggcagtcccaaaacccttacagtgaagatgtttactcattgcccccacctctggtccacactagaaagaagctcgccccacctccacctgtgagatccgtgaattctcggaatggcaggggaagccttgcactaggttgcagagaagcatcctccacatcctgtgtcagaaaccctggtctccgtggcacttgtaactcaccgtgctgtcttctggtctgtgtgtgttcttcaagccagctctaggcttcaggccgagccaggttcacactcagaaagaggtctccccatccccattcggggctgacgatggggggctgatggctgcccctgcgtggcctgagtcctggtccctctgaggcagttgacggggcagtcagatttttaaagttttgtacaaagttttcctttgtaatcactcccatttttacttaacaaccaacttgttgtggctcttatttctgaattcaaagcttgtgaaaaaataaagaaaatgaactgcccactgaaaaaaaaaaaaaaaaaa

SEQ ID NO: 34 - DNA, 4913 bp, Homo sapiens
cctcccagcgtccccaccctaggaggctgcatgcggattgaagacgtgcgcctgggggctgggccggccccgctgatcccgacctagcgagcaggatagcaggaccgcccaggctgcggaggggctcgggggcaggaaggtcagagcagcaagatggccagtaagaccaaggccagcgaggccctcaaggtggtggcccggtgccgccccctcagcaggaaggaggaggctgctggtcacgagcagatcctgaccatggacgtgaaactgggccaggtgaccctgcggaacccccgcgccgccccgggggagctgcccaagaccttcacctttgacgccgtgtatgatgccagctccaagcaggccgacctgtatgacgaaaccgtgaggcccctgatagactccgtgctccagggtttcaatggcacggtgtttgcctatggccagacgggcactggcaagacctataccatgcaggggacctgggtggagcccgagctgcgcggggtcatcccgaatgcctttgagcacatcttcacccacatctcccgctcccagaaccaacagtacctggtccgggcctcctatttggagatctaccaggaagagattcgagacctgctctccaaggagccgggcaagaggctagagctgaaagagaaccccgagactggcgtctacatcaaggacctctcctccttcgtcaccaagaatgtcaaggagattgagcatgtgatgaacctggggaaccagacccgggctgtgggcagcacccacatgaatgaggtcagctcccgctcccatgccatcttcatcatcactgtggagtgcagcgaacgtggctctgatggccaggaccacatccgagtgggcaagctcaacctcgtggacctggctggcagcgagaggcagaacaaggcaggccccaacacagcgggaggggcagccacaccatcctcgggtggcggtggtggcggtggaggcagtggtggtggtgctggtggagagaggcctaaggaagcctccaaaatcaacctctcattatctgccctgggcaacgtgattgctgccctggcgggcaacaggagcacccacattccctaccgggactccaagctgacccggctgctccaggactccctgggggggaatgcgaagaccatcatggtagccacactggggccagcttctcacagctacgatgagagcctctccaccttgcgctttgccaaccgagccaagaacatcaagaacaagccccgggtgaacgaggaccccaaggacacactgctgcgggaattccaagaggagattgcccgcctgaaggcccagctggagaagagggggatgctggggaagcggccccggaggaagagcagccgcaggaagaaggccgtgtccgccccgcctgggtaccctgagggcccagtgattgaggcttgggtggcagaagaggaggatgacaacaacaacaaccaccgcccgccccagcccatcctggagtcagccttggagaagaacatggagaattacctgcaggaacagaaggagcggctggaggaggagaaggcagccatccaggatgaccgcagcctggtgagcgaggagaagcagaagctgctggaggagaaggagaagatgctggaggacctgcggcgggaacagcaggccacagagctgcttgcggccaagtacaaggccatggagagcaagctcctcatcgggggcaggaacatcatggatcacaccaacgaacagcagaagatgttggaactgaagaggcaggagattgccgagcagaaacgtcgtgagcgggagatgcagcaggagatgatgctccgggacgaggagactatggagctccggggcacctacacatccctgcagcaggaggtggaggtcaaaaccaagaaactcaagaagctctacgccaagctgcaggcggtgaaggcggagatccaggaccagcatgatgagtatatccgcgtgcggcaggacctggaggaggcgcagaacgagcagacccgcgaactcaagctcaagtacctaatcatcgagaacttcatcccgccggaggagaagaacaagatcatgaaccggcttttcctggactgtgaggaggagcagtggaagttccagccactggtgccagccggcgtcagtagcagccagatgaagaagcggccaacatctgcagtgggctacaagaggcctatcagccagtatgctcgggttgccatggcaatggggtcccaccccaggtacagggctgaaaacataatgtttctggagttggatgtgtcccctccagctgtctttgagatggaattctctcacgaccaagaacaagaccctcgtgcgctacacatggagaggctcatgcgattggacagctttctggaaagaccttccacgtctaaagtccgaaagtccagatcctggtgccagagtcctcagcggcctccaccttccaccacacatgcctccctggcctctgcttctctgcgccctgcaacagtggcggaccatgagtgacaaccatcacgtcaggctgcccatccaatagactcctgggatggggcagccaaccctggctcatctcatctgccgcttggtgcgtgtgcgtgtgcgtgcatgtgcgtgtgcgtgtgtgcaggggtgagaatctggcagatggtgcctctgcctgctcttcttcgcctcctttatttaattcatgttatttattcgcggacgtctgttcgtgttggggagatgccctcgcctgagccgtctgggcctaccgtggtcactgcgtacgctctttttcttctgacttgagagctcccccagtcagatctcaggcttgtccccctgtcagctgcctccagaagggaaggtagccagtgcctgagaagacagtcccttttctacccaccgcactccataacctccatcttctcccacactgatggcgagcagcccctgagcactttctgggactgggagactgcttggtgttccctgaggacaagagacatcctgacagtgttgggcatctgctccccgtggacacagccccactctccactttctgagcctcagacaacctcattcagcctcttgggctccttttcaaggacattaataacctcaccaacatagctcatgcccttcagctttgacaagaactcacggcttcccaaactctgctttctgcccaccttggatgggaactgtggaccaagcaattaccatcgccttggaacctgcaggaaatggaacagcaattgagacaacttgaacagtcatcaacggaagtccctccactggattcctttgtttctgtcccctccgaggagtcattttggtcgacaggctctcaaggcaactccccattttcaagaggctgctcctgcctgcttcgatcatttctccctgcagctgcctagaccccgttcacagtgggaggagtcaatgtcattctacccctcgctaaacgaagatattaacatctattgctttttcccttcatctgtcacaggaaacagaagcccaggcacaatcttttccagctttgcctgttacccctgtttctgaattgcatctttaaggtattattttgttgacaatagatcctttattcactagttacgcaaattggttcctagggggatactccttaccttcctttgtgatggcccaaaatgtctctaggtatctcaagtgataagtaaatttctacaaaaaaaaaatggttaatgttcattgactggctttttaagtgtatattttggaggacgggtgaagaggtcataacgaaagcaagcgagtgaattaggatttcaaagtgccctaatagtgtgagtctccagttcctagaatatgaagagtgctgtcgttggggtgaaaccatgagactgacagatctgcctgaaatggggggtgtgggaggtggtggcgggggttattctctttccttcaggaaatgaacccttcttacatcattcaagttctgctctgaggatcaagcttgggtctgatttaactcagcgacactgtcatttctgcttcattactggactagagggttgagccacccacttgccatttgctcctgtccttccaggaaatcacaattttcatcagagcccaagagattatttgagactcaggattcagatcagaggttcgactgtggctgggacaggagttgtgtgtagaaattcaccaggtggcctgagcgcagggggacctccaggctgcgttgagcagcctctcccactgacctctttctcgtttgtggacaaagcagcacgtatcacctcattcatcacttggacacatcgcctttgcattgtcttgtcacacctccctcacagtcttatagcacaatatacccaaatcagcccccccagtccgaggctgggcccaaggtatggtcggaggaggagctcctgcctgcggttttgtgtatgtgtgtatgtgtgtgcgtgtttgtgtgcgtgtttacctccacaggggacactctacactcagtgtaagatctgctgggaacagggccaccaggagtgcgtggatctcagtctctctgtctctctttctctccttttaattttggtgtatcaaatatttgattgacaaagtaagggccttgattaggaccaaattctcgtgtgttgctatggtctttatttaggacaacaattaacaatgcagtggcccattcttgtcactctacacatatgactatacgggacatatgtaatatataaatatatatataaaacattcccctctgtccccttggcttcggatggaggaatttctgttgagctgaaatgcacctgcagctgggtgctgccagcagcttgcaggccccagccctgttccaatcaatgcagttgacaataaaggaatgagtatcgtcacgg

SEQ ID NO: 35 - DNA, 1231 bp, Homo sapiens
gaattccagaaaagaggtggagagggggggaataagaaagagagagaaggaaaggagagaaggcaggaagaaggcaagggacgagacaaccatgctgtgctgtatgagaagaaccaaacaggttgaaaaaaatgatgacgaccaaaagattgaacaagatggtatcaaaccagaagataaagctcataaggccgcaaccaaaattcaggctagcttccgtggacacataacaaggaaaaagctcaaaggagagaagaaggatgatgtccaagctgctgaggctgaagctaataagaaggatgaagcccctgttgccgatggggtggagaagaagggagaaggcaccactactgccgaagcagccccagccactggctccaagcctgatgagcccggcaaagcaggagaaactccttccgaggagaagaagggggagggtgatgctgccacagagcaggcagccccccaggctcctgcatcctcagaggagaaggccggctcagctgagacagaaagtgccactaaagcttccactgataactcgccgtcctccaaggctgaagatgccccagccaaggaggagcctaaacaagccgatgtgcctgctgctgtcactgctgctgctgccaccacccctgccgcagaggatgctgctgccaaggcaacagcccagcctccaacggagactggggagagcagccaagctgaagagaacatagaagctgtagatgaaaccaaacctaaggaaagtgcccggcaggacgagggtaaagaagaggaacctgaggctgaccaagaacatgcctgaactctaagaaatggctttccacatccccaccctcccctctcctgagcctgtctctccctaccctcttctcagctccactctgaagtcccttcctgtcctgctcacgtctgtgagtctgtcctttcccacccactagccctctttctctctgtgtggcaaacatttaaaaaaaaaaaaaaaaagcaggaaagatcccaagtcaaacagtgtggcttaaacattttttgtttcttggtgttgttatggcaagtttttggtaatgatgattcaatcattttgggaaattcttgcactgtatccaagttatttgatctggtgcgtgtggccctgtgggagtccactttcctctctctctctctctctgttccaagtgtgtgtgcaatgttccgttcatctgaggagtccaaaatattgagtgaattc

SEQ ID NO: 36 - DNA, 1587 bp, Homo sapiens
ccacgcgtccgcgttcttgctacaattgtaccatctggtaattcctgaaaatgtcaatttttttgtgttaatatttttggtttcaaacaataacaaatgtctctagaaagaaattttaagaaagcttaattaatagtaaaaatgcctttcctgaaataatcttggaaaattttttaaatgtcaaaatgatgagtcatgctaatacattgagggtttgtttttttgtttgtttgtttgtttttgagacagagtttcgctcttgttgcccaggctggagtgcaatggcccgatctcagctcaccgcaacctccacctcccggattccagcgattctcctgcctcagcctacattaagggttttgtcagacaattgtcacacgaagaatagtgtcacttatctgctcttgacacacagaactggcctggcatatagctttccagattttactcaaacttggtactccagtttgaaaatttaaattttgactgctgattagctggaaagcctagttttaatggaaagaaagtttgcttttaaaactgaaagtagtttctttttgctaacaaatctaacttcatacataattggccatattagtaaaacacctcatgatagcagtgtatatatagtcttgtttgtagttggaagtcatcttttaggagttattctcaaatatatataatagctacccatgcatcattattaaaatccccaaattcaaaaaacctctgatatatatatataatttttttttttttttttttttggccaactgagattgaaatccaagtgctggtttctagttctgaacatcaactaaagagttttggaaatgacagcaatttataacaagttcatattgacttcctctctatggcaggaagacattctgtgctgttttgaacagattaaagatttgtgtagtttgtgggaaattgacgtttttgtttaaattccacccgcgtttgtcttttcctaccacctgtggccaggtgctcgctggccatcacagttgcgattccatgagtagctgctttatgactgctttttgtactatctggatgtgcccagagttacttctgtacaagctctgtatctgtgtccgttgagaacattattttaacaagaagaacaccaacagtagcatgaaatataatactgttttataattctaaagctgctgttaatttatgaagtacataataatctaatgtaaactgcagaagtcagagcaagtgcctacattttgttatttttggcattactacagagccatgtacaatagaaagcaatgcaagacttgtaaactctcaccacttcttgtaatatcaaatgttccccctcaggttattttgcttatggtacccatgagttgcctctctctgtacatagataaattgttccaatattttcctttgatgtttggaactacagatagtcaagggctggaaattttagttttcaatataagcttccagcttagcaattacctctagtccaagacaatatttgattcctagttctgtttggggcaaattttcatttatctaaataaaatgcaatctaattaaaaaaaaaaaaaaaaa

SEQ ID NO: 37 - DNA, 9161 bp, Homo sapiens
ctgaaaactggagagtgtgagagcgggaggagcccccgaccacacaaacccagcctggggaggaacctactagtggctgcaccctcttttttaatagcaccaattgtgtttcccaagatgatgtagagaatttcagtgctgtgtaccacgtcggaggcagaaattcctctgctgtcccaggagcaggcagggcagtttttatctggaaaagctaaaggtctcctcttttgtttgtgtttttgtgcctgcacaggacaaaagatccttcatcaccgaagtgacgttttagaaacagtggtcctgatcaacccttctgatgaagcagtcagcaccgaggtgcgcttaatgatcactgatgctgcccgacacaagctgctcgtgctgaccgggcagtgctttgaaaataccggagagctcattctccagtccggctctttctccttccagaacttcatagagattttcaccgatcaagagatcggggagttactaagcaccacccatcctgccaacaaagccagcttaaccctgttctgtcctgaagaaggggactggaagaactccaatcttgacagacacaatctccaagacttcatcaatattaaactcaattcagcttctatcttgccagaaatggaaggactttctgagtttaccgagtatctctcagaatcagtggaagtcccatctccctttgacatcttggaacctcccacatcgggtggatttctgaagctctccaagccctgctgttatatttttccaggagggaggggcgattctgccttgtttgcagtgaatggtttcaatatgctcatcaatggcggatcagagagaaaatcctgcttctggaagctcatccgacacttagaccgagtggactccatcctgctcacccacattggggatgacaatttgcctggaataaacagcatgttacagcggaaaattgcagagctcgaggaagaacagtcccagggctccaccacaaatagtgactggatgaaaaacctcatctcccctgacttaggagttgtatttctcaatgtacctgaaaatctcaaaaatccagagccaaacatcaagatgaagagaagcatagaagaagcctgcttcactctccagtacctaaacaaattgtccatgaaaccagaacctctgtttagaagtgtaggcaatactattgatcctgtcattcttttccaaaaaatgggagtaggtaaacttgagatgtatgtgcttaatccagtcaagagcagcaaggaaatgcagtattttatgcagcagtggactggtaccaacaaagacaaggctgaattcattctgcctaatggtcaagaagtagatctcccgatttcctacttaacttcagtctcatctttgattgtgtggcatccagcaaaccctgcggagaaaatcatccgagtcctgtttcctgggaacagcacccagtacaacatcctggaagggttggaaaagctcaaacatctagactttctgaagcagccactggccacccaaaaggatctcactggccaggtgcccactcctgtggtgaaacaaacaaaactgaaacagagggctgatagccgagaaagtctgaagccagccgcaaaaccacttcctagcaaatccgtgcgcaaggagtcaaaagaagaaacccctgaggtcacaaaagtgaatcacgtggaaaagccacccaaagttgaaagcaaagaaaaggtaatggtgaaaaaagacaagccagtaaaaacagagaccaaaccttcagtgactgaaaaggaggttcccagcaaagaagagccatctccagtgaaagccgaggtggctgagaagcaagccacagatgtcaaacccaaagctgccaaggagaagacggtgaaaaaggaaacaaaggtaaagcctgaagacaagaaagaggagaaagaaaagccaaagaaagaagtggctaaaaaggaggacaaaacacctatcaagaaggaggaaaaaccaaaaaaggaagaggtgaaaaaagaagtcaaaaaagagatcaagaaagaagagaaaaaagaacccaagaaagaggttaagaaagaaacaccgccaaaggaagtcaagaaggaagttaagaaggaagagaagaaggaagtgaaaaaggaagaaaaggaacccaaaaaagaaattaagaagctccctaaagacgcaaagaaatcatctactcctctgtctgaagcaaaaaaaccagctgctttaaaaccaaaagtacccaagaaggaagagtctgtcaagaaagattctgttgctgccggaaagccaaaggagaaggggaaaataaaagtcattaagaaggaaggcaaggccgcagaggctgtcgctgcagctgtcggcactggagccaccacagcagctgtcatggcggcagctggaatagcagccattggccctgccaaagaactcgaagctgagaggtcccttatgtcatctcctgaggatctaaccaaggactttgaagagttaaaggctgaagaggtcgatgtaacaaaggacatcaagcctcagctggagctaatcgaagacgaagagaaactgaaggaaactgagccagtcgaagcctacgtcatccagaaggagagagaagtcaccaaaggtcctgccgagtcccctgatgagggaatcactaccactgaaggggagggcgaatgtgaacagacacctgaggagctggagcccgtcgagaagcagggagtagacgacattgaaaaatttgaagatgaaggagccggttttgaagaatcttcagagactggagactatgaagagaaggcagaaactgaggaggctgaggagccagaagaggatggggaggaacacgtatgtgtgagcgcctccaagcacagccccactgaggatgaggaaagtgccaaggcggaggctgatgcatacatcagggagaagagggagtctgtggccagtggggatgaccgagccgaagaagacatggatgaggccattgagaaaggagaggctgaacaatctgaagaggaggctgatgaggaggacaaagctgaagatgccagagaggaggaatatgagccggaaaaaatggaagctgaagactatgtgatggctgtggtcgacaaggctgcagaggctggtggtgccgaggagcagtatggattcctcaccacaccaaccaagcaactaggagcccagtctcctggccgagaacctgcatcttcaattcatgatgagactttacctggaggctcagagagcgaggccaccgcttctgatgaggagaatcgagaagaccagcctgaggaattcactgccacctctggctacactcagtctactattgagatatccagtgagcccacccccatggatgagatgtctacccctcgagacgtgatgagtgatgagaccaacaatgaagagacggagtccccttctcaggaattcgtaaatatcaccaaatatgaatcttcattgtattctcaggaatactctaaacctgctgatgttacaccgctcaacggattttctgaaggatcaaaaacagatgccactgatggcaaggattacaatgcttcagcctctaccatatcaccaccctcttccatggaggaagacaaattcagcagatctgctttacgtgatgcttactgctctgaagtgaaagccagcaccactttggacatcaaagatagcatctcagctgtttcaagtgaaaaggtcagcccatcgaagagcccgtccctgagtccatctccaccatcacccttagaaaagacccccctgggtgaacgtagtgtgaacttctctctgacgcccaatgagattaaagtctctgcagaggcagaagtagccccggtgtctcctgaggtgacccaagaagtagttgaagaacattgtgctagtcctgaggacaagactctggaagtggtgtcaccatctcagtccgtgactggcagtgctggtcacacaccttactatcaatctcctactgacgagaaatccagtcatctccctacagaagtcattgaaaaaccaccagcagttccagtgagttttgaattcagtgatgccaaagatgagaatgaaagggcttcagtaagccccatggatgagcccgtgcctgactcagagtctcctattgaaaaagttttgtctcctttacgcagcccgcccctcattggatccgagtctgcttatgaaagttttctaagtgctgatgacaaggcttctggcagaggtgccgaaagtccttttgaagaaaagagtggaaaacaaggctctccagaccaagtaagtccagtttctgaaatgacttctactagtctttaccaagacaaacaggaagggaaaagcacagactttgcaccaataaaagaagactttggccaagaaaagaaaactgatgatgttgaagccatgagttctcaaccagcactggctctggatgaaaggaaattaggagatgtttctcccacacaaatagatgtcagtcagtttggatcttttaaagaagacactaagatgtccatttctgaaggtactgtctcagacaagtcagctactcctgttgatgagggcgtagcagaagacacgtactctcatatggagggtgtggcctcagtgtccacagcctcagtggctacgagctcatttccagagccaacaacagatgatgtgtctccatctctgcatgctgaggttggctccccacattccacagaagtagatgactccctttcagtgtctgttgtgcaaacacctaccacattccaggaaacagaaatgtctccatctaaagaagaatgcccaagaccgatgtcaatttctccaccagatttctcccctaaaactgcaaagtccaggacacccgttcaagatcacagatctgaacagtcctcaatgtctattgaatttggccaagaatctcctgagcaatcccttgctatggacttcagtcgacagtctccagatcaccctacagtgggtgcaggcgtgcttcacatcactgaaaatgggccaactgaagtggactacagtccttctgacatgcaggactccagtttatcacataagataccacctatggaggagccgtcctacacccaagataatgatctttctgagctcatctcagtatctcaggtagaggcctccccgtccacctcttctgctcataccccttctcagatcgcttctcctctccaagaagatactctatccgatgttgctcctcccagagatatgtccttatatgcctcactcacctctgaaaaagtgcaaagtctggaaggagagaagctctctccaaaatctgatatctctccactcaccccacgagagtcctctcctttatattcacctactttttcagattctacctctgcagtcaaagagaaaacagcaacttgccacagttcctcttctccaccaatagatgcagcatccgcagagccctatggcttccgtgcctcagtgttattcgatacaatgcaacaccatctagccttgaatagagatttgtccacacctggcctggagaaggacagtggagggaagacacctggtgactttagctatgcctatcaaaagcctgaggaaacaaccaggtccccagatgaagaagattatgactatgagtcttatgagaagaccacccggacctcagatgtgggtggctattactatgagaagatagagagaaccacaaaatctccaagtgacagtggctactcctatgagaccattgggaaaactaccaagacccctgaagatggtgactattcctatgaaattattgagaagaccacacggacccctgaagagggtgggtactcatatgacataagtgaaaagaccaccagcccccccgaagtgagtggttacagctatgaaaagactgagaggtctagaaggcttctggatgacatcagcaatggctatgatgactctgaggatggtggccacacacttggggaccccagctactcttatgaaaccactgagaaaattaccagtttccctgagtctgaaggttattcctatgagacatctacaaagacaacacgaacccctgatacttccacatactgttacgagactgcagagaaaatcactagaacccctcaggcatccacatattcctacgagacttcagacctatgctacactgcagaaaagaagtccccctcagaagcccgtcaggatgtcgatttatgcctcgtgtcctcttgtgaatacaagcaccccaagacagagctttcaccctctttcattaatcccaatcctcttgagtggtttgccagtgaagaacccactgaagaatctgaaaagcccctcactcaatcagggggagccccaccgcctccaggaggaaagcaacagggccgacagtgtgatgaaacccctcccacctcagtcagcgagtcagccccatcccagaccgactctgatgttcccccggagactgaagagtgcccctccatcacggccgatgccaatatcgactctgaagacgagtcggaaaccatccccacagacaaaactgtcacgtacaaacacatggacccacctccagctcccgtgcaagaccgcagcccttcgccacgccaccctgatgtgtccatggtggacccagaggccttggccattgagcagaacctgggcaaagctctaaagaaagatctgaaagagaagaccaaaaccaaaaagccaggtacaaagaccaagtcatcttcacctgtcaaaaagagtgatgggaagtctaagcccttggcagcttcaccaaaaccagcgggcttgaaagaatcctcggataaagtgtccagggtggcttctcctaagaagaaagaatctgtggaaaaggcagcaaaacccaccaccactcctgaggtcaaagctgcacgtggggaagagaaagacaaggagaccaagaatgctgccaatgcctctgcatccaagtcggccaagaccgccactgcaggaccaggaactaccaagacgaccaagtcatctgctgtgcccccaggcctccctgtgtatttggacctgtgctacattcctaaccacagcaatagtaagaatgttgatgtggaatttttcaagagagtgcggtcttcctactacgtggtgagtgggaatgaccctgctgctgaggagcccagccgggctgtcctggacgctttgttggaaggaaaggctcagtggggcagcaacatgcaggtgacactgatcccaactcatgactcagaagtgatgagggaatggtaccaggagacccatgagaaacagcaagatctcaacatcatggttttagcaagcagcagcacagtggttatgcaagatgaatccttccctgcatgcaagattgaactgtaaaaaccaaggccagccacaccacaggatctgaactttgtttccagaaattcttcaatttgaaatcaccttttctaaaaagtcaattcatctagttaagtcgctgaacaattacctgccaaatgctatactgtgtcatggtgatgcaagtcactaaatttctcagtttttgctgattgctaagggaaataacagtatttccacaatagggttcaaattcctgcaaaattacctaccccagttcatctctgctgaacatttggaaaccatgcactagccaacccaactgacttctgctaggtagaggcatttgtcttagagagagagagagcgcgggagagagtgagagagagtgagagcacaaagataacgcaggagagagagagagaaagaatgagaaagaaaaggaatgcaagagaaggagatgtaatgacagagagttctggtgagatacccagagagaaaaagagagagcagggtggggtaaggaggagaaaataaaccaacaattaggtctgcattttctcaggcagtaggcattctttagtctacataggcaaagttttccatttttgtcagtctgagtcatcaaaaagagtcttaattttctaaaacaagttggctagaagaaagtaaaaagaacaacacttgttatgagggcatgtgatattttcacatcttaattaagctccttcagtttgaaggctgcacactgacataatgtagtgagtgtagactggccatgcaagtggtttgggccccattcagaactctcagactctaaacacacaagtagattgatctaaggcatgctcccagcatttgtccacccacttagtccactctgagtcgattaacctgcatgcagcaacacccaagtccaccccaattaactgaagcaaataccaaagcagttgggagtacatatggtagacaatttgccttaggaagtgacttgaatgtacaaagatacttgatgcacttattttttaatgtgagacagcaagtttataaaacatccatataggattatagatacttaaaggaacacgtgggtgagcgtgtgtgggggtactagaagctgatctgattggtccaacagtttgatgctgagtcatgcgtgttgaatcccacttcagtgcacctgtggcctctcagtcaaacaagttgtgcctttcacagcttctttactactgcaagttcaagactgaaatggcttctatgatcagaactgggaaaacagtgaatcttatggtggaagaggttctcagcaagtgtacagtatttaccttcctttgtcttacattggctttttaaattttccattaatttcaacataattatgggaacaagtgtacagaagaattttttttttaagatatgtgagaacttttcatagatgaactttttaacaaatgttttcatttacaggaaattgcaaagaaaattctcaagtgatagtctttttttttaagtgtttcgtaagacaaaaattgaataatgttttttgaagttctggcaagattgaagtctgatattgcagtaatgatatttattaaaaacccataactaccaggaataatgatacctcccaccccttgattcccataacataaaagtgctacttgagagtgggggagaatggcatggtaggctacttttcagggccttgacaagtacatcacccagtggtatcctacatacttctttcaagatcttcaaccatgaggtaaaagagccaagttcaaagaaccctagcacaaatttgctttgggattttcttttctgga

SEQ ID NO: 38 - DNA, 1190 bp, Homo sapiens
gccctccacaaagctcctgggcccctcctcccttcaaggattgcgaagaactggtcgcaaatcctcctaagccaccagcatctcggtcttcagctcacaccagccttgagcccagcctgcggccaggggaccacgcacgtcccacccacccagcgactccccagccgctgcccactcttcctcactcatggggaacagcaaaagtggggccctgtccaaggagatcctggaggagctgcagctgaacaccaagttctcggaggaggagctgtgctcctggtaccagtccttcctgaaggactgtcccaccggccgcatcacccagcagcagttccagagcatctacgccaagttcttccccgacaccgaccccaaggcctacgcccagcatgtgttccgcagcttcgattccaacctcgacggcaccctggacttcaaggagtacgtcatcgccctgcacatgaccaccgcgggcaagaccaaccagaagctggagtgggccttctccctctacgacgtggacggtaacgggaccatcagcaagaatgaagtgctggagatcgtcatggctattttcaaaatgatcactcccgaggacgtgaagctccttccagacgatgaaaacacgccggaaaagcgagccgagaagatctggaagtactttggaaagaatgatgatgataaacttacagagaaagaattcattgaggggacactggccaataaggaaattctgcgactgatccagtttgagcctcaaaaagtgaaggaaaagatgaagaacgcctgatgccaactgttcagctgtcctccctccacctaccactcacatgacacccgtgagcgcctgtgcacacacacacacatgcacacacacgcgcgcgcacacacacacacacacatccaccccagggccaagagaaaggcctgcacacaagcccacagcacagctccctgccaaactgaagcatctgtagtgacccactggttccttcttcctgggtcttcagcattccctcccatcatgcccggtcccacccctccctctgtccaccagcccatgtccctgtgctaatcccaggattaggccataggagtcctaagtgtcaccccgctgtaagctcctttgtggagtgctgggtaagcagtttccaataaacgcaagctgagctggaaaaaaaaaaaaaaaa

SEQ ID NO: 39 - DNA, 1880 bp, Homo sapiens
aggatgcaagagtcagagtgagggatctgtccctggatggggacaataaggggtcagttcagggggacttccttgagctctgaagtttcacctgagaatgggagattcagaacttggtgacagagtttgtggagctcactgtgtctttgctgatccttcagcaaaggaagtgagattgtttctagcttttctgtttggggtgcttctctgtcaactaaaagtcttcatcctttaaatattgcatcatttgtgtatacttcattcattcacttactcatgacccactcctcgagtgcctgcaatgggcaagcgtctgtcctaggagccgtgtgctgggccacagttaaatctgagagatcatgtgtggcatttctcatggattgagatgtctgagtgtcattgttttgagagagctagtggcatggtttataaagctgtttttcattttctccatacaggacaacagctttgagcagttcattattaattattgtaacgaaaagctgcaacaaatcttcattgaacttactcttaaagaagagcaggaggagtatatacgggaggatatagaatggactcacattgactacttcaataatgctatcatttgtgacctaatagaaaataacacaaatggaatcctggccatgctggatgaagagtgcctcagacctggcacagtcactgatgagaccttcttagaaaagctgaaccaagtatgtgccacccaccagcattttgaaagcaggatgagcaagtgctctcggttcctcaatgacacgtctctgcctcacagctgcttcaggatccagcattatgctggaaaggtgctgtaccaggtggaaggattcgttgacaaaaacaatgaccttctctatcgagacctgccccaagccatgtggaaggccagccatgccctcatcaagtctttgttccccgaagggaatcccgccaagatcaacctgaaaaggcctcctacagcaggctcacagttcaaggcatccgtggccactctgatgaaaaacctacagaccaagaacccaaactatattaggtatttttggcacatgaaactttcacagttcaaatgtgagagcaccccgaaggaatatcatttttccctttgcttcaatctgagtgtagcccaagcagagggtaactaaaatacttacagattaaataataccttatctgggattggcttaaaaaatgctccactatcctttcccctaaaataagaaagtaaaaaagtaaagtgtggtggagaagatagtagatatttaatgaagctcagtggttgagacctaggggttttcaactttctgtatgtttattattatttttttaacggcaagttaaaaaacaaaatgcaagtgttttttctggtcagtgttttgcagaaaactcttgttggcttcatttgggattcttgttctattagcttagagcacagcattgaagcaagtgctttagttaactgctctggcacttcttaggagacatgcacttttttcttccctgtgagaggtgtaggcctggagaaagtaatgattcctaaagcaatctgaattttttccaaggcagtagaaagaccttcttaaaaagggctgggcgtggtggctcacacctataatcccaacacttagggaggcggaggcaggtggatcacctcaggtcaggaattcgagactagcctggccaacatggcaaaaccctgtctctactaaaaatataaaaattagctgggcgtggtggcagggacctataatcccaactacttgggaggctgaggcaggagaatcgcttggaggcagaggttgcagtgagccgaggtcacgccactgcactccagcccgggtgacaatacaagactccatctc

SEQ ID NO: 40 - DNA, 1880 bp, Homo sapiens; identical to SEQ ID NO: 39

SEQ ID NO: 41 - DNA, 2685 bp, Homo sapiens
ggacttgggaggcgcggtgaggagtcaggcttaaaacttgttggaggggagtaaccagcctgctcctctcgctctcctcctcgtctgcgccgcgtttcagagagaaaattcctgttccaagagaaaataaggcaacatcaatgaaggagagaagagccagccagaaattatccagcaaatctatcatggatcctaatcagaacgtgaaatgcaagatagttgtggtgggagacagtcagtgtggaaaaactgcgctgctccatgtcttcgccaaggactgcttccccgagaattacgttcctacagtgtttgagaattacacggccagttttgaaatcgacacacaaagaatagagttgagcctgtgggacacttcgggttctccttactatgacaatgtccgccccctctcttaccctgattcggatgctgtgctgatttgctttgacatcagtagaccagagaccctggacagtgtcctcaaaaagtggaaaggtgaaatccaggaattttgtccaaataccaaaatgctcttggtcggctgcaagtctgatctgcggacagatgttagtacattagtagagctctccaatcacaggcagacgccagtgtcctatgaccagggggcaaatatggccaaacagattggagcagctacttatatcgaatgctcagctttacagtcggaaaatagcgtcagagacatttttcacgttgccaccttggcatgtgtaaataagacaaataaaaacgttaagcggaacaaatcacagagagccacaaagcggatttcacacatgcctagcagaccagaactctcggcagttgctacggacttacgaaaggacaaagcgaagagctgcactgtgatgtgaatctttcattatctttaatgaagacaaaggaatctagtgtaaaaaacaacagcaaacaaaaaggtgaagtctaaatgaagtgcacagccaaagtcatgtataccagaggcttaggaggcgtttgagaggatactcatctttttggaatcctgaccttaggttcggcatgtagaccaagtgatgagaagtgaatacatggaagagtttttaagtgtgacttgaaaaatatgccaaaaaatgagagatacaaatgagctagaggaagatgaggggggatgcgagtacctccaagaagaaaaatcacactctgaatggtgcttgcatttttgggttttttttttttttgttataatctattcatggatctccactttgatttaatttttaaatgttttaatctcctttacaaaaagtatacgttaatataccgtcctcaagggggaactggcactgtgaccttagcatttagttttctagaggatgtgatctaatttctttctagctcatcattaaaaaggaaattgtatcaggacccatgggatatatccagaggcaaactttatgaggctttgaaatcttgccttcctgaagatagctgagtaggatggttctaaggaaagcctttgcaatcttgcaagatttgtagaccagcactacaaagatcgcatagatcaaataggaaaaaaaatgtcgatttttattcagtctgatggttctgttcttcattgtgattgtcattaaaaagtggtaaattgctcaatgtaatatttttgtgcgctgtttagaagttgtgtgattttttgccatcgttgataaaaatgcaaagtcaaataaaaggtgtcttggtttgatgtcatagaatgatccaaggagagaaaaaaggtagttactgttttcaccagaaaaggtaatgagtgaaggaaagaatagtagcagaaagcacagtttgtgagtaaagctgtctggaattaagttaccaaaaatacaaagcaaaaggactattattttgggttgaagctccaaaactgacagcatctgataatctgttggtttatttcacttttcattaaatgaacattgatgagagaagatgccacttacccaagctttagagaatccctagtggaagattatatgataaactttcagtcctgacataacactagggcatttctagagtgtcattgctaaaacctcactgaacagacgcagccaaggtctgtgttcagcacttggtctctgttgttacgtaaaataataagcatttaaaatagtttacagatatttttgaccagttccttttagagattctttcagagaagaaaccagatctgacctgtttattgttggcgcttgttgaaaacgagctttctttcccatgatagtgcttcgtttttgaagtgttgaagctgtgctccccttaaatcgtggcaggagagattaaggtaattacaacactcagttctatgtcttacaagcactttgtcttgtctctgcaagaaaattcgattccagtcatttcccataaaatacagacattttaccaacataatatgctttgattgatgcagcattatgctttgggcagtattacaaaatagctggcgagtgctttctgtatttaaatattgtaaaaagaaaataagttataactgttataaagcagaacttttgttgcattttttaaactgttgaagtcactgtgtatgtttgtttggtcaatgtttccgcagtatttattaaaacatacttttttttttcttcaaataaaaaagtaaccatgtctttgtctaaaaaaaaaaaaaaaaaa

SEQ ID NO: 42 - DNA, 4469 bp, Homo sapiens
cctgcagcctccggagtcagtgccgcgcgcccgccgccccgcgccttcctgctcgccgcacctccgggagccggggcgcacccagcccgcagcgccgcctccccgcccgcgccgcctccgaccgcaggccgagggccgccactggccggggggaccgggcagcagcttgcggccgcggagccgggcaacgctggggactgcgccttttgtccccggaggtccctggaagtttgcggcaggacgcgcgcggggaggcggcggaggcagccccgacgtcgcggagaacagggcgcagagccggcatgggcatcgggcgcagcgaggggggccgccgcggggccctgggcgtgctgctggcgctgggcgcggcgcttctggccgtgggctcggccagcgagtacgactacgtgagcttccagtcggacatcggcccgtaccagagcgggcgcttctacaccaagccacctcagtgcgtggacatccccgcggacctgcggctgtgccacaacgtgggctacaagaagatggtgctgcccaacctgctggagcacgagaccatggcggaggtgaagcagcaggccagcagctgggtgcccctgctcaacaagaactgccacgccgggacccaggtcttcctctgctcgctcttcgcgcccgtctgcctggaccggcccatctacccgtgtcgctggctctgcgaggccgtgcgcgactcgtgcgagccggtcatgcagttcttcggcttctactggcccgagatgcttaagtgtgacaagttcccggagggggacgtctgcatcgccatgacgccgcccaatgccaccgaagcctccaagccccaaggcacaacggtgtgtcctccctgtgacaacgagttgaaatctgaggccatcattgaacatctctgtgccagcgagtttgcactgaggatgaaaataaaagaagtgaaaaaagaaaatggcgacaagaagattgtccccaagaagaagaagcccctgaagttggggcccatcaagaagaaggacctgaagaagcttgtgctgtacctgaagaatggggctgactgtccctgccaccagctggacaacctcagccaccacttcctcatcatgggccgcaaggtgaagagccagtacttgctgacggccatccacaagtgggacaagaaaaacaaggagttcaaaaacttcatgaagaaaatgaaaaaccatgagtgccccacctttcagtccgtgtttaagtgattctcccgggggcagggtggggagggagcctcgggtggggtgggagcgggggggacagtgcccgggaacccgtggtcacacacacgcactgccctgtcagtagtggacattgtaatccagtcggcttgttcttgcagcattcccgctccctttccctccatagccacgctccaaaccccagggtagccatggccgggtaaagcaagggccatttagattaggaaggtttttaagatccgcaatgtggagcagcagccactgcacaggaggaggtgacaaaccatttccaacagcaacacagccactaaaacacaaaaagggggattgggcggaaagtgagagccagcagcaaaaactacattttgcaacttgttggtgtggatctattggctgatctatgcctttcaactagaaaattctaatgattggcaagtcacgttgttttcaggtccagagtagtttctttctgtctgctttaaatggaaacagactcataccacacttacaattaaggtcaagcccagaaagtgataagtgcagggaggaaaagtgcaagtccattatctaatagtgacagcaaagggaccaggggagaggcattgccttctctgcccacagtctttccgtgtgattgtctttgaatctgaatcagccagtctcagatgccccaaagtttcggttcctatgagcccggggcatgatctgatccccaagacatgtggaggggcagcctgtgcctgcctttgtgtcagaaaaaggaaaccacagtgagcctgagagagacggcgattttcgggctgagaaggcagtagttttcaaaacacatagttaaaaaagaaacaaatgaaaaaaattttagaacagtccagcaaattgctagtcagggtgaattgtgaaattgggtgaagagcttaggattctaatctcatgttttttccttttcacatttttaaaagaacaatgacaaacacccacttatttttcaaggttttaaaacagtctacattgagcatttgaaaggtgtgctagaacaaggtctcctgatccgtccgaggctgcttcccagaggagcagctctccccaggcatttgccaagggaggcggatttccctggtagtgtagctgtgtggctttccttcctgaagagtccgtggttgccctagaacctaacaccccctagcaaaactcacagagctttccgtttttttctttcctgtaaagaaacatttcctttgaacttgattgcctatggatcaaagaaattcagaacagcctgcctgttcccccgcactttttacatatatttgtttcatttctgcagatggaaagttgacatgggtggggtgtccccatccagcgagagagtttcaaaagcaaaacatctctgcagtttttcccaagtaccctgagatacttcccaaagcccttatgtttaatcagcgatgtatataagccagttcacttagacaactttacccttcttgtccaatgtacaggaagtagttctaaaaaaaatgcatattaatttcttcccccaaagccggattcttaattctctgcaacactttgaggacatttatgattgtccctctgggccaatgcttatacccagtgaggatgctgcagtgaggctgtaaagtggccccctgcggccctagcctgacccggagaaaggatggtagattctgttaactcttgaagactccagtatgaaaatcagcatgcccgcctagttacctaccggagagttatcctgataaattaacctctcacagttagtgatcctgtccttttaacaccttttttgtggggttctctctgacctttcatcgtaaagtgctggggaccttaagtgatttgcctgtaattttggatgattaaaaaatgtgtatatatattagctaattagaaatattctacttctctgttgtcaaactgaaattcagagcaagttcctgagtgcgtggatctgggtcttagttctggttgattcactcaagagttcagtgctcatacgtatctgctcattttgacaaagtgcctcatgcaaccgggccctctctctgcggcagagtccttagtggaggggtttacctggaacataagtagttaccacagaatacggaagagcaggtgactgtgctgtgcagctctctaaatgggaattctcaggtaggaagcaacagcttcagaaagagctcaaaataaattggaaatgtgaatcgcagctgtgggttttaccaccgtctgtctcagagtcccaggaccttgagtgtcattagttactttattgaaggttttagacccatagcagctttgtctctgtcacatcagcaatttcagaaccaaaagggaggctctctgtaggcacagagctgcactatcacgagcctttgtttttctccacaaagtatctaacaaaaccaatgtgcagactgattggcctggtcattggtctccgagagaggaggtttgcctgtgatttgcctgtgatttcctaattatcgctagggccaaggtgggatttgtaaagctttacaataatcattctggatagagtcctgggaggtccttggcagaactcagttaaatctttgaagaatatttgtagttatcttagaagatagcatgggaggtgaggattccaaaaacattttatttttaaaatatcctgtgtaacacttggctcttggtacctgtgggttagcatcaagttctccccagggtagaattcaatcagagctccagtttgcatttggatgtgtaaattacagtaatcccatttcccaaacctaaaatctgtttttctcatcagactctgagtaactggttgctgtgtcataacttcatagatgcaggaggctcaggtgatctgtttgaggagagcaccctaggcagcctgcagggaataacatactggccgttctgacctgttgccagcagatacacaggacatggatgaaattcccgtttcctctagtttcttcctgtagtactcctcttttagatcctaagtctcttacaaaagctttgaatactgtgaaaatgttttacattccatttcatttgtgttgtttttttaactgcattttaccagatgttttgatgttatcgcttatgttaatagtaattcccgtacgtgttcattttattttcatgctttttcagccatgtatcaatattcacttgactaaaatcactcaattaatcaatgaaaaaaaaaaa

SEQ ID NO: 43 - DNA, 1607 bp, Homo sapiens
gctctgtagcacccaggagcggggaagcgaagtgcgagagaccccggaccccagcgctgtctcttcccgccgcccgaaccaccatgacccacttcaacaagggcccttcctatgggctctcggccgaagtcaagaacaagattgcttccaagtatgatcatcaggcagaagaagatcttcgcaattggatagaagaggtgacaggcatgagcattggccccaacttccagctgggcttaaaggatggcatcatcctctgcgaacttataaacaagctacagccaggctcagtgaagaaggtcaacgagtcctcactgaactggcctcagttggagaatattggcaactttattaaagctattcaggcttatggtatgaagccacatgacatattcgaagcaaatgatctttttgagaatggaaacatgacccaggttcagactactctggtggctctagcaggtctggctaaaacaaaaggattccatacaaccattgacattggagttaagtatgcagaaaaacaaacaagacgttttgatgaaggaaaattaaaagctggccaaagtgtaattggtctgcagatgggaaccaacaaatgtgccagccaggcaggtatgacagcttacgggactaggaggcatctttatgatcccaaaatgcaaactgacaaaccttttgaccagaccacaattagtctgcagatgggcactaataaaggagccagccaggcagggatgttagcaccaggtaccagaagagacatctatgatcagaagctaacattacagccggtggacaactcgacaatttccctacagatgggtaccaacaaagttgcttcccagaaaggaatgagtgtgtatgggcttgggcggcaagtatatgatcccaaatactgtgctgctcctacagaacctgtcattcacaacggaagccaaggaacaggaacaaatggttcggaaatcagtgatagtgattatcaggcagaataccctgatgagtatcatggcgagtaccaggatgactaccccagagattaccaatatagcgaccaaggcattgattattagatccacacagaaggagctcagtatttagtcctttgtttttattcagtgagaaccaagctagccttgagtaatttttatcttgtcttcctaaaacactattaagcttattgtacttttaagaaaaattgccttacgtacattcctttttcctttttctgcctcttccctcaatagttgccttttagtgctgtaataggttaaatcctacagcataatcaataactcgcatatgaagtaaaaaggaatactgtgaaaggggagtactcttgtacagccagttcttttatgcaaaaatctatgcatttttacaatcttatattaaactggtattttcaaacaataggaaactttttttttttttttttacagtttagtgtatctggtttctacatggaagactaaactcatgcttattgctaaatgtggtctttgccaactaaatttaagatgcagcattttagaaatttacatatcaatgtttctacagtattgtttgctaatttttaaataaagtcatgatcagtgtgaaaaaaa

SEQ ID NO: 44 - DNA, 3144 bp, Homo sapiens
ggcacgagggtccgcccgggggcgccgcccaccgcgcctcgctcgggccgttgccgtctgcacccagaccctgagccgccgccgccggccatggaggtggcgccggagcagccgcgctggatggcgcacccggccgtgctgaatgcgcagcaccccgactcacaccacccgggcctggcgcacaactacatggaacccgcgcagctgctgcctccagacgaggtggacgtcttcttcaatcacctcgactcgcagggcaacccctactatgccaaccccgctcacgcgcgggcgcgcgtctcctacagccccgcgcacgcccgcctgaccggaggccagatgtgccgcccacacttgttgcacagcccgggtttgccctggctggacgggggcaaagcagccctctctgccgctgcggcccaccaccacaacccctggaccgtgagccccttctccaagacgccactgcacccctcagctgctggaggccctggaggcccactctctgtgtacccaggggctgggggtgggagcgggggaggcagcgggagctcagtggcctccctcacccctacagcagcccactctggctcccaccttttcggcttcccacccacgccacccaaagaagtgtctcctgaccctagcaccacgggggctgcgtctccagcctcatcttccgcggggggtagtgcagcccgaggagaggacaaggacggcgtcaagtaccaggtgtcactgacggagagcatgaagatggaaagtggcagtcccctgcgcccaggcctagctactatgggcacccagcctgctacacaccaccccatccccacctacccctcctatgtgccggcggctgcccacgactacagcagcggactcttccaccccggaggcttcctggggggaccggcctccagcttcacccctaagcagcgcagcaaggctcgttcctgttcagaaggccgggagtgtgtcaactgtggggccacagccacccctctctggcggcgggacggcaccggccactacctgtgcaatgcctgtggcctctaccacaagatgaatgggcagaaccgaccactcatcaagcccaagcgaagactgtcggccgccagaagagccggcacctgttgtgcaaattgtcagacgacaaccaccaccttatggcgccgaaacgccaacggggaccctgtctgcaacgcctgtggcctctactacaagctgcacaatgttaacaggccactgaccatgaagaaggaagggatccagactcggaaccggaagatgtccaacaagtccaagaagagcaagaaaggggcggagtgcttcgaggagctgtcaaagtgcatgcaggagaagtcatcccccttcagtgcagctgccctggctggacacatggcacctgtgggccacctcccgcccttcagccactccggacacatcctgcccactccgacgcccatccacccctcctccagcctctccttcggccacccccacccgtccagcatggtgaccgccatgggctagggaacagatggacgtcgaggaccgggcactcccgggatgggtggaccaaacccttagcagcccagcatttcccgaaggccgacaccactcctgccagcccggctcggcccagcaccccctctcctggagggcgcccagcagcctgccagcagttactgtgaatgttccccaccgctgagaggctgcctccgcacctgactgctgcccaggtggggtttcctgcatggacagttgtttggagaacaacaaggacaactttatgtagagaaaaggaggggacgggacagacgaaggcaaccatttttagaaggaaaaaggattaggcaaaaataatttattttgctcttgtttctaacaaggacttggagacttggtggtctgagctgtcccaagtcctccggttcttcctcgggattggcgggtccacttgccagggctctgggggcagatttgtggggacctcagcctgcaccctcttctcttctggcttccctctctgaaatagccgaactccaggctgggctgagccaaagccagagtggccacggcccagggagggtgagctggtgcctgctttgacgggccaggccctggagggcagagacaatcacgggcggtcctgcacagattcccaggccagggctgggtcacaggaaggaaacaacattttcttgaaaggggaaacgtctcccagatcgctcccttggctttgaggccgaagctgctgtgactgtgtccccttactgagcgcaagccacagcctgtcttgtcaggtggaccctgtaaatacatcctttttctgctaacccttcaaccccctcgcctcctactctgagacaaaagaaaaaatattaaaaaaatgcataggcttaactcgctgatgagttaattgttttatttttaaactctttttgggtccagttgattgtacgtagccacaggagccctgctatgaaaggaataaaacctacacacaaggttggagctttgcaattctttttggaaaagagctgggatcccacagccctagtatgaaagctgggggtggggaggggcctttgctgcccttggtttctgggggctggttggcatttgctggcctggcagggggtgaaggcaggagttgggggcaggtcaggaccaggacccagggagaggctgtgtccctgctggggtctcaggtccagctttactgtggctgtctggatccttcccaaggtacagctgtatataaacgtgtcccgagcttagattctgtatgcggtgacggcggggtgtggtggcctgtgaggggcccctggcccaggaggaggattgtgctgatgtagtgaccaagtgcaatatgggcgggcagtcgctgcagggagcaccacggccagaagtaacttattttgtactagtgtccgcataagaaaaagaatcggcagtattttctgtttttatgttttatttggcttgttttattttggattagtgaactaagttattgttaattatgtacaacatttatatattgtctgtaaaaaatgtatgctatcctcttattcctttaaagtgagtactgttaagaataataaaatactttttgtgaaaaaaaaaaaaaaaaaaaaa

SEQ ID NO: 45 - DNA, 2038 bp, Homo sapiens
cgaagggctcgaagatggccggttggcagagctacgtggataacctgatgtgcgatggctgctgccaggaggccgccattgtcggctactgcgacgccaaatacgtctgggcagccacggccgggggcgtctttcagagcattacgccaatagaaatagatatgattgtaggaaaagaccgggaaggtttctttaccaacggtttgactcttggcgcgaagaaatgctcagtgatcagagatagtctatacgtcgatggtgactgcacaatggacatccggacaaagagtcaaggtggggagccaacatacaatgtggctgtcggcagagctggtagagtcttggtctttgtaatgggaaaagaaggggtccatggaggcggattgaataagaaggcatactcaatggcaaaatacttgagagactctgggttctagctgctaggcagactgttaagtattaggggaaaattgctcttaaactttcctagctataagcttaagtcttaattctggaaattttattagcaatgcagggtgatggggtatgaacctgtgtctcctttgtatccctctgttggtggggaaaggtgtctttctttctgccctccccccccaaaataattctgttcacttttgttttgtttccttgtgtactccagcattggttatagtcatgggaaaggaaggtgtccacggaggcacacttaacaagaaagcatatgaactcgctttatacctgaggaggtctgatgtgtaagcagcctctccccatctacctagcaactgtcttcatcaacaaccctaattatggtcacaatgctaccaaactgtagatggtagctaatttttctttacctattttctaatgtcatgattcctgtttgcccaatggatcatttgtatgttaaccactgtatgtaaccaacccttatctggcaacataattgcagcacaataatgatttgcatgataccttgaaattggggggagggggcatgccaagttgggcatcactttgtcttagcaattaatgggatattgattactaaaataagttaatattaagcaaggtgccggttgtacaatctctgatcagtgtcttttcagcactttgagcatttacttggctcatttagtcttccttttgtagcgcatggttgggaggaaaaagtgcatgcatcattccttcactcttctctttttcccgcccccccctcccttcgcacataggcatttggtttgcttccatctttttttatgcagtgcctgtttttttttaaccaattaaaatcccttttgttgatgagctattgagagctgcagtagtttgcttttagtattgttgttgcacttgagcagagacaaacctttattcatagtgtctacaggacatatgaagagtgcaatggcaaaacaagagcaaaaagcacttcctcccatgaccttacagtaaccatactgattgaatccccagggacattccatcattgcaatagctcagatttttcttcctttttctttgcacaccagctctactctttagtaaaattgtaaaaggctgccattatggacattaggtatcccaacataaccatctggagtgtgtccagtttgttcttcataggaccaatttttatttgcagcttgagtttttatatgaagttgcattattgtggacttggctgtcttgtgatgaatttttttcatatgtattctgtgccatactattgttaaaatgaactgttgctattgtgagatggattttaactgacctattaagggtttctttcgaatggcactactttagggacattctagtatttgcttctattgtttgggccttgtggataatgtacagatttaaaaacaaatcttgttgctgatttgtccatttctttccctgcactttgttacatctgggatacagtctaactcatctgatttaatatgcatttaaaaaaatgccataactattaaacaccttgtttacagacagatgaaataaatttattccaaccaaaaaaaaaaaaaaaaaa

SEQ ID NO: 46 - DNA, 5487 bp, Homo sapiens
tctgtcgacttgccccagagctgatccttgtctttgtccacttctcagcgaggatggcacttcagggagcccttcccttactatcgcagagagagcaggccctccccagtcatgtccaacccagaactctgttttgttttcttcatagccctagcatcacagaaaatcaccctgtgcattcatggatgtccacgggggcaagggctttgtgttgcttaacccagcatcctgaaccgtgtttgttgaatgaatacagaaccccgtttgctctgggagagcacagaaaacagtcttctatcatatatcatagccagctgcaaacagcagatggcttcccatatcccagagagtaagaaccagagagagagagaaagagagagagtttgggtctttctcctctgtgcctgctctctccagagaaactggaggggtagcagttagcattcccccgctggttccaccaagcacagtcaaggtctctaggacatggccacccctcacctgtggaagcggtcctgctggggtgggtgggtgttagttggttctggtttgggtcagagacacccagtggcccaggtgggcgtggggccagggcgcagacgagaaggggcacgagggctccgctccgaggacccagcggcaagcaccggtcccgggcgcgccccagcccacccactcgcgtgcccacggcggcattattccctataaggatctgaacgatccgggggcggccccgccccgttaccccttgcccccggccccgccccctttttggagggccgatgaggtaatgcggctctgccattggtctgagggggcgggccccaacagcccgaggcggggtccccgggggcccagcgctatatcactcggccgcccaggcagcggcgcagagcgggcagcaggcaggcggcgggcgctcagacggcttctcctcctcctcttgctcctccagctcctgctccttcgccgggaggccgcccgccgagtcctgcgccagcgccgaggcagcctcgctgcgccccatcccgtcccgccgggcactcggagggcagcgcgccggaggccaaggttgccccgcacggcccggcgggcgagcgagctcgggctgcagcagccccgccggcggcgcgcacggcaactttggagaggcgagcagcagccccggcagcggcggcagcagcggcaatgaccccttggctcgggctcatcgtgctcctgggcagctggagcctgggggactggggcgccgaggcgtgcacatgctcgcccagccacccccaggacgccttctgcaactccgacatcgtgatccgggccaaggtggtggggaagaagctggtaaaggaggggcccttcggcacgctggtctacaccatcaagcagatgaagatgtaccgaggcttcaccaagatgccccatgtgcagtacatccacacggaagcttccgagagtctctgtggccttaagctggaggtcaacaagtaccagtacctgctgacaggtcgcgtctatgatggcaagatgtacacggggctgtgcaacttcgtggagaggtgggaccagctcaccctctcccagcgcaaggggctgaactatcggtatcacctgggttgtaactgcaagatcaagtcctgctactacctgccttgctttgtgacttccaagaacgagtgtctctggaccgacatgctctccaatttcggttaccctggctaccagtccaaacactacgcctgcatccggcagaagggcggctactgcagctggtaccgaggatgggcccccccggataaaagcatcatcaatgccacagacccctgagcgccagaccctgccccacctcacttccctcccttcccgctgagcttcccttggacactaactcttcccagatgatgacaatgaaattagtgcctgttttcttgcaaatttagcacttggaacatttaaagaaaggtctatgctgtcatatggggtttattgggaactatcctcctggccccaccctgccccttctttttggttttgacatcattcatttccacctgggaatttctggtgccatgccagaaagaatgaggaacctgtattcctcttcttcgtgataatataatctctatttttttaggaaaacaaaaatgaaaaactactccatttgaggattgtaattcccacccctcttgcttcttccccacctcaccatctcccagaccctcttccctttgcccttctcctccaatacataaaggacacagacaaggaacttgctgaaaggccaaccatttcaggatcagtcaaaggcagcaagcagatagactcaaggtgtgtgaaagatgttatacaccaggagctgccactgcatgtcccaaccagactgtgtctgtctgtgtctgcatgtaagagtgagggagggaaggaaggaactacaagagagtcggagatgatgcagcacacacacaattccccagcccagtgatgcttgtgttgaccagatgttcctgagtctggagcaagcacccaggccagaataacagagctttcttagttggtgaagacttaaacatctgcctgaggtcaggaggcaatttgcctgccttgtacaaaagctcaggtgaaagactgagatgaatgtctttcctctccctgcctcccaccagacttcctcctggaaaacgctttggtagatttggccaggagctttcttttatgtaaattggataaatacacacaccatacactatccacagatatagccaagtagatttgggtagaggatactatttccagaatagtgtttagctcacctagggggatatgtttgtatacacatttgcatatacccacatggggacataagctaatttttttacaggacacagaattctgttcaatgctgttaaatatgccaatagtttaatctcttctattttgttgtcgttgcttgtttgaagaaaatcatgacattccaagttgacatttttttttcattttaattaaaatttgaaattctgaacaccgtcagcaccctctcttccctatcatgggtcatctgacccctgtccgtctccttgtccctgcttcatgtttgggggcctttctttaactgccttcctggcttagctcagatggcagatgagagtgtagtcaagggcctgggcacaggagggagagctgcagagtgtcctgcctgccttggctggagggacacctctcctgggtgtggagacagcttggttccctttccctagctccctggtgggtgaatgccacctcctgagatcctcacctcttggaattaaaattgttggtcactggggaaagcctgagtttgcaaccagttgtagggtttctgttgtgtttttttttttttttttgaaataaaactataatataaattctcctattaaataaaattattttaagttttagtgtcaaaagtgagatgctgagagtaggtgataatgtatattttacagagtgggggttggcaggatggtgacattgaacatgattgctctctgtctcttttttcagcttatgggtatttatcttctattagtatttgtatcttcagttcattccactttaggaaacagagctgccaattgaaacagaagaagaaaaaaaaaaaaagcagcagacaacacactgtagagtcttgcacacacacaagtgcccaggcaaggtgcttggcagaaccgcagagtgggaagagagtaccggcatcgggtttccttgggatcaatttcattaccgtgtacctttcccattgtggtcatgccatttggcagggggagaatgggaggcttggccttctttgtgaggcagtgtgagcagaagctgatgccagcatgtcactggttttgaagggatgagcccagacttgatgttttgggattgtccttattttaacctcaaggtctcgcatggtggggcccctgaccaacctacacaagttccctcccacaagtggacatcagtgtcttctctgtgaggcatctggccattcgcactccctggtgtggtcagcctctctcacacaaggaggaacttgggtgaaggctgagtgtgaggcacctgaagtttccctgcggagtcgataaattagcagaaccacatccccatctgttaggccttggtgaggaggccctgggcaaagaagggtctttcgcaaagcgatgtcagagggcggttttgagctttctataagctatagctttgtttatttcacccgttcacttactgtataatttaaaatcatttatgtagctgagacacttctgtatttcaatcatatcatgaacattttattttgctaaatcttgtgtcatgtgtaggctgtaatatgtgtacattgtgtttaagagaaaaatgaaacccacatgccgccattttcctgaatcaaattctgcagtggaatggagaggaaaatacttctaggcaagcagctagactggtgaattgggggaaatagaaggaactagtaactgagactcctccagcctcctccctattggaatcccaatggctcctggagtaggaaaaaagtttaaactacattcatgttcttgttctgtgtcactcggccctgggtagtctaccatttacttcaccccaagtcctgctgcccatccagttgggaagccatgattttcctaagaatccagggccatgggagatacaattccaagttctcgcttcctcctttgggcatctcttctgcctcccaatcaaggaagctccatgctcaggctctcagctctcgggccagtgctctgctctgtccagggtaggtaatactgggagactcctgtcttttaccctcccctcgttccagacctgcctcatggtggcaacatggttcttgaacaattaaagaaacaaatgactttttggaatagccctgtctagggcaaactgtggcccccaggagacactacccttccatgccccagacctctgtcttgcatgtgacaattgacaatctggactaccccaagatggcacccaagtgtttggcttctggctacctaaggttaacatgtcactagagtatttttatgagagacaaacattataaaaatctgatggcaaaagcaaaacaaaatggaaagtaggggaggtggatgtgacaacaacttccaaattggctctttggaggcgagaggaaggggagaacttggagaatagtttttgctttgggggtagaggcttcttagattctcccagcatccgcctttccctttagccagtctgctgtcctgaaacccagaagtgatggagagaaaccaacaagagatctcgaaccctgtctagaaggaatgtatttgttgctaaatttcgtagcactgtttacagttttcctccatgttatttatgaattttatattccgtgaatgtatattgtcttgtaatgttgcataatgttcactttttatagtgtgtcctttattctaaacagtaaagtggttttatttctatcac

SEQ ID NO: 47 - DNA, 2407 bp, Homo sapiens
ggcacgaggcggagggggctcagtccgcagccgccgccgccaccgccgcgcctcggcctcggtgcaggcagcggccgccgccgccgagacagctgcgcgggcgagcatccccacgcagcaccttggaagttgttttcaaccatatccagcctttgccgaatacatcctatctgccacacatccagcgtgaggtccctccagctacaaggtgggcaccatggcggagaagtttgactgccactactgcagggatcccttgcaggggaagaagtatgtgcaaaaggatggccaccactgctgcctgaaatgctttgacaagttctgtgccaacacctgtgtggaatgccgcaagcccatcggtgcggactccaaggaggtgcactataagaaccgcttctggcatgacacctgcttccgctgtgccaagtgccttcaccccttggccaatgagacctttgtggccaaggacaacaagatcctgtgcaacaagtgcaccactcgggaggactcccccaagtgcaaggggtgcttcaaggccattgtggcaggagatcaaaacgtggagtacaaggggaccgtctggcacaaagactgcttcacctgtagtaactgcaagcaagtcatcgggactggaagcttcttccctaaaggggaggacttctactgcgtgacttgccatgagaccaagtttgccaagcattgcgtgaagtgcaacaaggccatcacatctggaggaatcacttaccaggatcagccctggcatgccgattgctttgtgtgtgttacctgctctaagaagctggctgggcagcgtttcaccgctgtggaggaccagtattactgcgtggattgctacaagaactttgtggccaagaagtgtgctggatgcaagaaccccatcactgggtttggtaaaggctccagtgtggtggcctatgaaggacaatcctggcacgactactgcttccactgcaaaaaatgctccgtgaatctggccaacaagcgctttgttttccaccaggagcaagtgtattgtcccgactgtgccaaaaagctgtaaactgacaggggctcctgtcctgtaaaatggcatttgaatctcgttctttgtgtccttactttctgccctataccatcaataggggaagagtggtccttcccttctttaaagttctccttccgtcttttctcccattttacagtattactcaaataagggcacacagtgatcatattagcatttagcaaaaagcaaccctgcagcaaagtgaatttctgtccggctgcaatttaaaaatgaaaacttaggtagattgactcttctgcatgtttctcatagagcagaaaagtgctaatcatttagccacttagtgatgtaagcaagaagcataggagataaaacccccactgagatgcctctcatgcctcagctgggacccaccgtgtagacacacgacatgcaagagttgcagcggctgctccaactcactgctcaccctcttctgtgagcaggaaaagaaccctactgacatgcatggtttaacttcctcatcagaactctgcccttccttctgttcttttgtgctttcaaataactaacacgaacttccagaaaattaacatttgaacttagctgtaattctaaactgacctttccccgtactaacgtttggtttccccgtgtggcatgttttctgagcgttcctactttaaagcatggaacatgcaggtgatttgggaagtgtagaaagacctgagaaaacgagcctgtttcagaggaacatcgtcacaacgaatacttctggaagcttaacaaaactaaccctgctgtcctttttattgtttttaattaatatttttgttttaattgatagcaaaatagtttatgggtttggaaacttgcatgaaaatattttagccccctcagatgttcctgcagtgctgaaattcatcctacggaagtaaccgcaaaactctagagggggagttgagcaggcgccagggctgtcatcaacatggatatgacatttcacaacagtgactagttgaatcccttgtaacgtagtagttgtctgctctttgtccatgtgttaatgaggactgcaaagtcccttctgttgtgattcctaggacttttcctcaagaggaaatctggatttccacctaccgcttacctgaaatgcaggatcacctacttactgtattctacattattatatgacatagtataatgagacaatatcaaaagtaaacatgtaatgacaatacatactaacattcttgtaggagtggttagagaagctgatgcctcatttctacattctgtcattagctattatcatctaacgtttcagtgtatccttacagaaataaagcagcatatgaaaaaaaaaaaaaaaaaaaaaaa

SEQ ID NO: 48 - DNA, 2649 bp, Homo sapiens
tccgaattaattggatttcattcactggggaggaacaaaaactatctgggcagcttcattgagagagattcattgacactaagagccagcggctgcagctgggtgcagagagaacctccggctttacttctgtctcgtctgccccaaccgctagcctcggcttgggtaaggcgaggcggaattaaaccccgctccgagagcggcagcttcgcgcgcggtgcgctcggcctatgcctgccccgaggggcgtctggtaggcaccccgccctctcccgcagctcgacccccatgatagatacgctcagacccgtgcccttcgcgtcggaaatggcgatcagcaagacggtggcgtggctcaacgagcagctggagctgggcaacgagcggctgctgctgatggactgccggccgcaggagctatacgagtcgtcgcacatcgagtcggccatcaacgtggccatcccgggcatcatgctgcggcgcctgcagaagggtaacctgccggtgcgcgcgctcttcacgcgcggcgaggaccgggaccgcttcacccggcgctgtggcaccgacacagtggtgctctacgacgagagcagcagcgactggaacgagaatacgggcggcgagtcgttgctcgggctgctgctcaagaagctcaaggacgagggctgccgggcgttctacctggaaggtggcttcagtaagttccaagccgagttctccctgcattgcgagaccaatctagacggctcgtgtagcagcagctcgccgccgttgccagtgctggggctcgggggcctgcggatcagctctgactcttcctcggacatcgagtctgaccttgaccgagaccccaatagtgcaacagactcggatggtagtccgctgtccaacagccagccttccttcccagtggagatcttgcccttcctctacttgggctgtgccaaagactccaccaacttggacgtgttggaggaattcggcatcaagtacatcttgaacgtcacccccaatttgccgaatctctttgagaacgcaggagagtttaaatacaagcaaatccccatctcggatcactggagccaaaacctgtcccagtttttccctgaggccatttctttcatagatgaagcccggggcaagaactgtggtgtcttggtacattgcttggctggcattagccgctcagtcactgtgactgtggcttaccttatgcagaagctcaatctgtcgatgaacgatgcctatgacattgtcaaaatgaaaaaatccaacatatcccctaacttcaacttcatgggtcagctgctggacttcgagaggacgctgggactcagcagcccatgtgacaacagggttccagcacagcagctgtattttaccaccccttccaaccagaatgtataccaggtggactctctgcaatctacgtgaaagaccccacatccctccttgctggaatgtgtctggcccttcagcagtttctcttggcagcatcagctgggctgctttctttgtgtgtggccccaggtgtcaaaatgacaccagctgtctgtactagacaaggttaccaagtgcggaattggttaatactaacagagagatttgctccattctctttggaataacaggacatgctgtatagatacaggcagtaggtttgctctgtacccatgtgtacagcctacccatgcagggactgggattcgaggacttccaggcgcatagggtagaaccaaatgatagggtaggagcatgtgttctttagggccttgtaaggctgtttccttttgcatctggaactgactatataattgtcttcaatgaagactaattcaattttgcatatagaggagccaaagagagatttcagctctgtatttgtggtatcagtttggaaaaaaaaatctgatactccatttgattattgtaaatatttgatcttgaatcacttgacagtgtttgtttgaattgtgtttgttttttcctttgatgggcttaaaagaaattatccaaagggagaaagagcagtatgccacttcttaaaacagaacaaaacaaaaaaagaaaattgtgctcttttctaatccaaagggtatatttgcagcatgcttgactttaccaattctgatgacatctttacggacactattatcactaagaccttgttatggcgaagtctttagtctttttcatgtattttcctcatgattttttctctttatgtagtttgactatgccttacctttgtaaatatttttgcttgtgttgtcgcaaaggggataatctgggaaagacaccaaatcatgggctcactttaaaaaaagaaagaataaaaaaaccttcagctgtgctaaacagtatattacctctgtataaaattcttcagggagtgtcacctcaaatgcaatactttgggttggtttctttcctttaaaaaaatttgtataaaactggaagtgtgtgtgtgtgagcatgggtacccatttgataagagaaatgcatttgattgtgaagaagggagagttaaattctccattatgttcgtggtgtaaagtttagagctggaatttattataagaatgtaaaaccttaaattattaataaataactattttggctattgaaaaaaaaaaaaaaaaaaaaaaa

SEQ ID NO: 49 - DNA, 670 bp, Homo sapiens
cggccacgaggcggaatcccttctgctctcccagcgcagcgccgccgcccggcccctccagcttcccggaccatggccaacctggagcgcaccttcatcgccatcaagccggacggcgtgcagcgcggcctggtgggcgagatcatcaagcgcttcgagcagaagggattccgcctcgtggccatgaagttcctccgggcctctgaagaacacctgaagcagcactacattgacctgaaagaccgaccattcttccctgggctggtgaagtacatgaactcagggccggttgtggccatggtctgggaggggctgaacgtggtgaagacaggccgagtgatgcttggggagaccaatccagcagattcaaagccaggcaccattcgtggggacttctgcattcaggttggcaggaacatcattcatggcagtgattcagtaaaaagtgctgaaaaagaaatcagcctatggtttaagcctgaagaactggttgactacaagtcttgtgctcatgactgggtctatgaataagaggtggacacaacagcagtctccttcagcacggcgtggtgtgtccctggacacagctcttcattccattgacttagaggcaacaggattgatcattcttttatagagcatatttgccaataaagcttttggaagccgg

SEQ ID NO: 50 - DNA, 1675 bp, Homo sapiens
ccagccgtccattccggtggaggcagaggcagtcctggggctctggggctcgggctttgtcaccgggacccgcaggagccagaaccactcggcgccgcctggtgcatgggaggggagccgggccaggagtaagtaactcatacgggcgccggggacccgggtcgggctgggggcttccaactcagagggagtgtgatttgcctgatcctcttcggcgttgtcctgctctgccgcatccagccctgtaccgccatcccacttcccgccgttcccatctgtgttccgggtgggatcggtctggaggcggccgaggacttcccaggcaggagctcggggcggaggccgggtccgcggcagaccagggcagcgaggcgctggccggcagggggcgctgcggtgccagcctgaggctgggctgctccgcgaggatacagcggcccctgccctgtcctgtcctgccctgccctgtcctgtcctgccctgccctgccctgtcctgtcctgccctgccctgccctgtgtcctcagacaatatgttagccgtgcactttgacaagccgggaggaccggaaaacctctacgtgaaggaggtggccaagccgagcccgggggagggtgaagtcctcctgaaggtggcggccagcgccctgaaccgggcggacttaatgcagagacaaggccagtatgacccacctccaggagccagcaacattttgggacttgaggcatctggacatgtggcagagctggggcctggctgccagggacactggaagatcggggacacagccatggctctgctccccggtgggggccaggctcagtacgtcactgtccccgaagggctcctcatgcctatcccagagggattgaccctgacccaggctgcagccatcccagaggcctggctcaccgccttccagctgttacatcttgtgggaaatgttcaggctggagactatgtgctaatccatgcaggactgagtggtgtgggcacagctgctatccaactcacccggatggctggagctattcctctggtcacagctggctcccagaagaagcttcaaatggcagaaaagcttggagcagctgctggattcaattacaaaaaagaggatttctctgaagcaacgctgaaattcaccaaaggtgctggagttaatcttattctagactgcataggcggatcctactgggagaagaacgtcaactgcctggctcttgatggtcgatgggttctctatggtctgatgggaggaggtgacatcaatgggcccctgttttcaaagctactttttaagcgaggaagtctgatcaccagtttgctgaggtctagggacaataagtacaagcaaatgctggtgaatgctttcacggagcaaattctgcctcacttctccacggagggcccccaacgtctgctgccggttctggacagaatctacccagtgaccgaaatccaggaggcccataagtacatggaggccaacaagaacataggcaagatcgtcctggaactgccccagtgaaggaggatggggcaggacaggacgcggccaccccaggcctttccagagcaaacctggagaagattcacaatagacaggccaagaaacccggtgcttcctccagagccgtttaaagctgatatgaggaaataaagagtgaactgg

SEQ ID NO: 51 - DNA, 4099 bp, Homo sapiens
cagctgccagccgaggaggcgcggcggagaggggactgcggtcagctgcgtccacttggggctgtgcggcggtcccgcgcccggcgatgttcccgggcactccctgagtagcggcagcttatcccccgcccgctagcccgccctggtccccggctcgctcgctggctggcgcggccccggccccgctctgcgtcggccccgccgcggtggaggcgcgcgagggggacgcggccggggatgagcggattgcgggtgaactcgccgcccgggggccccgcgaagccgtgagccgctgcttttctccgagtcgccgccctgcccttggatttgagatcatgtccatccacatcgtggcgctggggaacgagggggacacattccaccaggacaaccggccgtcggggcttatccgcacttacctggggagaagccctctggtctccggggacgagagcagcttgttgctgaacgcggccagcacggtcgcgcgtccggtgttcaccgagtatcaggccagtgcgtttgggaatgtcaagctggtggtccacgactgtcccgtctgggacatatttgacagtgattggtacacttctcgaaatctaattgggggcgctgacatcattgtgatcaaatacaacgttaatgacaagttttcattccatgaagtaaaggataattatattccagtgataaaaagagcattaaattcagttccagtaattattgctgctgttggtaccagacaaaatgaagagttaccttgtacatgcccactatgtacctcagacagagggagctgtgttagtacaactgaagggatccaacttgcaaaagaactaggagcaacctatcttgaactccacagccttgatgacttctacataggaaagtattttggaggagtgttggagtattttatgattcaagccttaaatcagaagacaagtgaaaaaatgaagaaaagaaaaatgagcaactcctttcatggaattagaccacctcaacttgaacaaccagaaaaaatgcctgtcttaaaggctgaagcgtcacattataactctgacttaaataacttgctgttctgctgccagtgtgtggacgtggtattttataaccccgatttaaagaaagttgtagaggcccacaagatcgttctctgcgctgtaagccatgttttcatgctgcttttcaatgtgaagagtcccactgacattcaggattccagtatcatccgaactacccaggatctttttgctataaacagagatactgcatttccaggtgctagccatgaatcttcaggcaacccaccattacgagtcattgttaaagacgccctcttctgttcttgtttatcagacatccttcgcttcatttattcaggtgcttttcagtgggaagaattggaagaagatatcaggaagaagttgaaagattctggggatgtttcaaatgtaatcgagaaagttaaatgcattttaaaaacaccaggaaagattaattgcctaaggaattgcaaaacctatcaagccagaaaacctttgtggttttataacacttccctcaagtttttccttaataagccgatgcttgccgatgttgtcttcgaaattcaaggtacgacagtgccagcccacagggccatcctggtggcccgttgtgaagtgatggcagccatgtttaatggtaattacatggaagcaaagagtgtcctgattcccgtttatggtgtttccaaagagactttcttgtcatttttagaatacctgtacacagactcctgctgcccagctggcatattccaggccatgtgtctcctgatctgtgccgagatgtaccaagtgtccagactgcagcacatctgtgagctgttcatcattacccagctgcagagcatgccaagcagggaactggcatccatgaaccttgatatagttgacctgcttaaaaaggccaagtttcaccactctgattgcctttcaacctggctacttcatttcattgctactaactacctcatcttcagtcaaaagcctgaatttcaggatctttcagtggaagaacgcagttttgttgaaaagcacagatggccgtcgaatatgtacttgaagcagcttgcggaatacaggaagtatattcactcccggaaatgtcgttgcttagtaatgtaacctggagcttttatacactacatttcttttttattattatgaagaatgggatacctccaggttccagtaaaattcttctgaccgaaaccaatgtgggtgttagaaaaattaccatatagcttaatatgtttattagttctctttggaaaaaaactaccactgtggtcttaaaagggaacaaaatataccataggctaaaactaaggctttcactctagaatgcaaagctgttttgcagctgttttcccttaaagatgtcctgttgctttagtgatatttagacccctctcagttaagaaatgcttagattaaaaaaaaaaaattacgtaggattaatacagaaatttaatcatgtctgattaattgctctattaaaataaggggcatttaaagacccagcataaccatttgtataatgagaaatctaggggaaaaccaatcagtccaacatgagattttaggaatagaaatttgccggccatttggaaagtgaaatgccacttagttctcaattgatgacagtgtttgaatcatcataaaaaaaatacctgcttttcatctggacaacccaattgagccactttatctccttttggcaatctgagtaggcggggaacctaggcagggctggctttcttagcgtgtaacttgtgtagcagcacagggcccacacttagaaggaccccacacttggttcaaggctctgctatagcggaaattcttaataatgtttgaagaagggccccatgatttcattttgtgctgagccctcaaaattatgtctgtttcgtggtgggaaatatcctatgttttcttgctcaaacacctttctctctgaaagcagaaaaaggcactgatataaagggaagagaaggaggctcaccggagggaagagaacatagtgaagattcccgcctttggggaggtctggaccacccagggcctccactgccaccttggctggcaagggagaaatgtgttgtgttgtcttagctttaaaacagtcacagttcttgctctatcatagatgaacaaatactttcttgatcattctgtaagaccaggaggttggtaagagtgactaaccagcctaactttaatacacatgtataaagatgttcacagagaaagatgctctgtagagaatttgctaccgaagttggctcaagaatttgtttttagtgttatttaccaagattaggacgtcagtggcttaaattctttgaattcttttcaaggactgcaagattatttgataaagagtagcatgaatcttgtgctctaatattacacagtaagttcaaagaaaggatgtaagtcaaagacttgttacatagagggaaaatggactgggatagaggacagactgatagtttctttctttcatatcacatgtatagagaaataattatatcagaaactcacaaacctagacatggaaaaacagattactgtctattgtcagcatcattttcatctgtaagtcactactggaatatatttttcttttaatttccagtgactttagaatacacacagtttttccgacttttcaaaaatttgattaaatggttttatagtataatattgggaccccataccgttagcccttgtatgtataccaacactgccaaagtaaaacattaggtcaggcatggtggctcaggcctgtaatcccagcattttgggaggctgaggcaagtggataacttgaggtcatgagttcgaaaccagcctggccaaaacagtgaaaccccgtctctactaaaaatacaaaattagccagatgtggtggcgcacacctgtaatcccagctactcaggaagctgaggcaggaaaatcgcttgaacctgggaggtggaagttgcagtgagccgagatcgcaccactgcactccagcctgggtgacaagagcgaaactccatctc

SEQ ID NO: 52 - DNA, 2508 bp, Homo sapiens
cgcgcccctccctcctcgcggacctggcggtgccggcgcccggagtggccctttaaaaggcagcttattgtccggagggggcgggcggggggcgccgaccgcggcctgaggcccggcccctcccctctccctccctctgtccccgcgtcgctcgctggctagctcgctggctcgctcgcccgtccggcgcacgctccgcctccgtcagttggctccgctgtcgggtgcgcggcgtggagcggcagccggtctggacgcgcggccggggctgggggctgggagcgcggcgcgcaagatctccccgcgcgagagcggcccctgccaccgggcgaggcctgcgccgcgatggcagagatgggcagtaaaggggtgacggcgggaaagatcgccagcaacgtgcagaagaagctcacccgcgcgcaggagaaggttctccagaagctggggaaggcagatgagaccaaggatgagcagtttgagcagtgcgtccagaatttcaacaagcagctgacggagggcacccggctgcagaaggatctccggacctacctggcctccgtcaaagccatgcacgaggcttccaagaagctgaatgagtgtctgcaggaggtgtatgagcccgattggcccggcagggatgaggcaaacaagatcgcagagaacaacgacctgctgtggatggattaccaccagaagctggtggaccaggcgctgctgaccatggacacgtacctgggccagttccccgacatcaagtcacgcattgccaagcgggggcgcaagctggtggactacgacagtgcccggcaccactacgagtcccttcaaactgccaaaaagaaggatgaagccaaaattgccaagcctgtctcgctgcttgagaaagccgccccccagtggtgccaaggcaaactgcaggctcatctcgtagctcaaactaacctgctccgaaatcaggccgaggaggagctcatcaaagcccagaaggtgtttgaggagatgaatgtggatctgcaggaggagctgccgtccctgtggaacagccgcgtaggtttctacgtcaacacgttccagagcatcgcgggcctggaggaaaacttccacaaggagatgagcaagctcaaccagaacctcaatgatgtgctggtcggcctggagaagcaacacgggagcaacaccttcacggtcaaggcccagcccagtgacaacgcgcctgcaaaagggaacaagagcccttcgcctccagatggctcccctgccgccacccccgagatcagagtcaaccacgagccagagccggccggcggggccacgcccggggccaccctccccaagtccccatctcagtttgaggccccggggcctttctcggagcaggccagtctgctggacctggactttgaccccctcccgcccgtgacgagccctgtgaaggcacccacgccctctggtcagtcaattccatgggacctctgggagcccacagagagtccagccggcagcctgccttccggggagcccagcgctgccgagggcacctttgctgtgtcctggcccagccagacggccgagccggggcctgcccaaccagcagaggcctcggaggtggcgggtgggacccaacctgcggctggagcccaggagccaggggagacggcggcaagtgaagcagcctccagctctcttcctgctgtcgtggtggagaccttcccagcaactgtgaatggcaccgtggagggcggcagtggggccgggcgcttggacctgcccccaggtttcatgttcaaggtacaggcccagcacgactacacggccactgacacagacgagctgcagctcaaggctggtgatgtggtgctggtgatccccttccagaaccctgaagagcaggatgaaggctggctcatgggcgtgaaggagagcgactggaaccagcacaaggagctggagaagtgccgtggcgtcttccccgagaacttcactgagagggtcccatgacggcggggcccaggcagcctccgggcgtgtgaagaacacctcctcccgaaaaatgtgtggttcttttttttgttttgttttcgtttttcatcttttgaagagcaaagggaaatcaagaggagacccccaggcagaggggcgttctcccaaagattaggtcgttttccaaagagccgcgtcccggcaagtccggcggaattcaccagtgttcctgaagctgctgtgtcctctagttgagtttctggcgcccctgcctgtgcccgcatgtgtgcctggccgcagggcggggctgggggctgccgagccaccatgcttgcctgaagcttcggccgcgccacccgggcaagggtcctcttttcctggcagctgctgtgggtggggcccagacaccagcctagcctggctctgccccgcagacggtctgtgtgctgtttgaaaataaatcttagtgttcaaaacaaaatgaaacaaaaaaaaaatgataaaaactctcaaaaaaaaaaaaaaaaa

SEQ ID NO: 53 - DNA, 2278 bp, Homo sapiens
ggggagtgctccattttccccgacagcgaatttcccctgagaaacgatactagaccctgggtttgcccaccttgtaactcttccttatctcctccttttcatccctaattcatcctccctctggcatggaattgacgcccgtgcagtacatttgccaagtggcaccttctttcaatttatgttttattttgctatggtggtgattctttatttgctggttgtcttttctcacacatctttctctctgtctctctctttcctgctctttgtttttctgcccagaaaaacctgacttcgataccaaaaaagatgaaactacagaaactcaaatttaaaaaaaactttaaaagaaacaaaaaaatactcaacgattctttcagctttattaacattttccattgtttcttgcgacttgtgtctcgttctttgtagtattgatgatgaacatttgataatgaatgttcttgtatattcagataaagaaaaaaaaaaccaaaaaagcggtctgaatttaatagtgtttataataaaaattttaaaaatgaccctcatagcacgcaaaacaggatggggaatttcccctcttctttctgtgacaatgcgcatcattcctgcattagtttttaacaccagactacctacattcatcatttccctcatttttcttttattttcttgcatttgtgaattagttcaagaatgctagaaaagtgtcgagttgtgcacatccatttcttgtttcacaatgtttaaaagtgacagtaattcattttgtaaactaaaaaaaaaaaaaaaaaggttggaatagtgagcataataggtacaacctaacacattattatgtttattaactttgagacccagaaataaattcttttcttttcttgattcttgctcttaaaaatacaaaaaaaaaaatgttttgttttgtgttatttttggtttgtttattggggggctttttttaattgtcaggattatgatcttgctgtttttcttcaatatgtatacaaggtgatgtgaaaagatgacttgggcagaggagtaagaacaagtaggcttgttcttctactttgcttcagaattcagttaatgccaaaagcgaagatcaagcccatgttgatgtctcgttgctcacctgcatttccagagagtgtgacactcatgcagtccctgagaaaaataaaatcagggacatacttctccttttagccttttaaaaattcaaaaacgtttagtccaagggaactttttatgctatcaggaaaggtttttgctgtttttgattctgattatcacagccaagtactttgttttatttctccctaattaataactacattccatgaggcctcttccaaccaaagaggccttttcttccaggagagtcccgcaggagatgctggtatgatgggcaccattggttaagtaaactacatgcaggaagaagtccttggggccagtctgccagctgagtcctggttttggatgaagagttaatgagatattgggccaggctcaatgctgtagttttaatgctaagaggttacgtttacttcacagagtacacctcttagtaacctctgacttaggcagctgcttaaagcaaattgcaaaactggcttgatttggaatgtttttattagaggaaaaaagaaagccatattatctggaaaaaaattcattttaaataccatcattcaacaaattatgttcagaaagtggtcagaacttaagcaagaaaagtaaagaaagaatgcagaattgtggagcaatgctttaggaaatatttctacctgaacacttgtactcttgaagtcacaacaaaataatgatgagcttttcacatcacctttatggtttcaatccctagctcaaagcttcctggaatcttttattttttgtaaacttttttttcttttgttaaaataaataaaacattcaatgtttttctccttttctctcttattacttctttcctttggcattttcaatttgaaatgctttcctttggttgttggttttattctccccctacccctccccttttcttattattcagaatataaacctgcaaagctctgctctgttttggttttgaaagtttaagcttttctgcttctgtgagagcacaggcttctgtcccttttgattccaactgaacttttgtgttctctaatgatactaacacggtgtaggttttacagtctcctaatttgtactggtaatgcatattccaaataaatagtttcttttgttgcaaaaaaaaaaaaaaaaa

SEQ ID NO: 54 - DNA, 4322 bp, Homo sapiens
cccccagaggcgccggagcccggaatcccgctcggagccagccagccgtcccgagctaccagcaggtttcattgaaaacagatcctgcaaaagttccaggtgcccacactggaaacttggagatcctgcttcccagaccacagctgtggggaacttggggtggagcagagaagtttctgtattcagctgcccaggcagaggagaatggggtctccacagcctgaagaatgaagacacgacagaataaagactcgatgtcaatgaggagtggacggaagaaagaggcccctgggccccgggaagaactgagatcgaggggccgggcctcccctggaggggtcagcacgtccagcagtgatggcaaagctgagaagtccaggcagacagccaagaaggcccgagtagaggaagcctccaccccaaaggtcaacaagcagggtcggagtgaggagatctcagagagtgaaagtgaggagaccaatgcaccaaaaaagaccaaaactgaggaactccctcggccacagtctccctccgatctggatagcttggacgggcggagccttaatgatgatggcagcagcgaccctagggatatcgaccaggacaaccgaagcacgtcccccagtatctacagccctggaagtgtggagaatgactctgactcatcttctggcctgtcccagggcccagcccgcccctaccacccacctccactctttcctccttcccctcaaccgccagacagcacccctcgacagccagaggctagctttgaaccccatccttctgtgacacccactggatatcatgctcccatggagccccccacatctcgaatgttccaggctcctcctggggcccctccccctcacccacagctctatcccgggggcactggtggagttttgtctggacccccaatgggtcccaaggggggaggggctgcctcatcagtggggggccctaatgggggtaagcagcaccccccacccactactcccatttcagtatcaagctctggggctagtggtgctcccccaacaaagccgcctaccactccagtgggtggtgggaacctaccttctgctccaccaccagccaacttcccccatgtgacaccgaacctgcctcccccacctgccctgagacccctcaacaatgcatcagcctctccccctggcctgggggcccaaccactacctggtcatctgccctctccccacgccatgggacagggtatcggtggacttcctcctggcccagagaagggcccaactctggctccttcaccccactctctgcctcctgcttcctcttctgctccagcgccccccatgaggtttccttattcatcctctagtagtagctctgcagcagcctcctcttccagttcttcctcctcttcctctgcctcccccttcccagcttcccaggcattgcccagctacccccactctttccctcccccaacaagcctctctgtctccaatcagccccccaagtatactcagccttctctcccatcccaggctgtgtggagccagggtcccccaccacctcctccctatggccgcctcttagccaacagcaatgcccatccaggccccttccctccctctactggggcccagtccaccgcccacccaccagtctcaacacatcaccatcaccaccagcaacagcaacagcagcagcagcagcagcagcagcagcagcatcacggaaactctgggccccctcctcctggagcatttccccacccactggagggcggtagctcccaccacgcacacccttacgccatgtctccctccctggggtctctgaggccctacccaccagggccagcacacctgcccccacctcacagccaggtgtcctacagccaagcaggccccaatggccctccagtctcttcctcttccaactcttcctcttccacttctcaagggtcctacccatgttcacacccctccccttcccagggccctcaaggggcgccctaccctttcccaccggtgcctacggtcaccacctcttcggctaccctttccacggtcattgccaccgtggcttcctcgccagcaggctacaaaacggcctccccacctgggcccccaccgtacggaaagagagccccgtccccgggggcctacaagacagccaccccacccggatacaaacccgggtcgcctccctccttccgaacggggaccccaccgggctatcgaggaacctcgccacctgcaggcccagggaccttcaagccgggctcgcccaccgtgggacctgggcccctgccacctgcggggccctcaggcctgccatcgctgccaccaccacctgcggcccctgcctcagggccgcccctgagcgccacgcagatcaaacaggagccggctgaggagtatgagacccccgagagcccggtgcccccagcccgcagcccctcgccccctcccaaggtggtagatgtacccagccatgccagtcagtctgccaggttcaacaaacacctggatcgcggcttcaactcgtgcgcgcgcagcgacctgtacttcgtgccactggagggctccaagctggccaagaagcgggccgacctggtggagaaggtgcggcgcgaggccgagcagcgcgcgcgcgaagaaaaggagcgcgagcgcgagcgggaacgcgagaaagagcgcgagcgcgagaaggagcgcgagcttgaacgcagcgtgaagttggctcaggagggccgtgctccggtggaatgcccatctctgggcccagtgccccatcgccctccatttgaaccgggcagtgcggtggctacagtgcccccctacctgggtcctgacactccagccttgcgcactctcagtgaatatgcccggcctcatgtcatgtctcctggcaatcgcaaccatccattctacgtgcccctgggggcagtggacccggggctcctgggttacaatgtcccggccctgtacagcagtgatccagctgcccgggagagggaacgggaagcccgtgaacgagacctccgtgaccgcctcaagcctggctttgaggtgaagcctagtgagctggaacccctacatggggtccctgggccgggcttggatccctttccccgacatgggggcctggctctgcagcctggcccacctggcctgcaccctttcccctttcatccgagcctggggcccctggagcgagaacgtctagcgctggcagctgggccagccctgcggcctgacatgtcctatgctgagcggctggcagctgagaggcagcacgcagaaagggtggcggccctgggcaatgacccactggcccggctgcagatgctcaatgtgactccccatcaccaccagcactcccacatccactcgcacctgcacctgcaccagcaagatgctatccatgcagcctctgcctcggtgcaccctctcattgaccccctggcctcagggtctcaccttacccggatcccctacccagctggaactctccctaaccccctgcttcctcaccctctgcacgagaacgaagttcttcgtcaccagctctttgctgccccttaccgggacctgccggcctccctttctgccccgatgtcagcagctcatcagctgcaggccatgcacgcacagtcagctgagctgcagcgcttggcgctggaacagcagcagtggctgcatgcccatcacccgctgcacagtgtgccgctgcctgcccaggaggactactacagtcacctgaagaaggaaagcgacaagccactgtagaacctgcgatcaagagagcaccatggctcctacattggaccttggagcacccccaccctccccccaccgtgcccttggcctgccacccagagccaagagggtgctgctcagttgcagggcctccgcagctggacagagagtgggggagggagggacagacagaaggccaaggcccgatgtggtgtgcagaggtggggaggtggcgaggatggggacagaaagcgcacagaatcttggaccaggtctctcttccttgtcccccctgcttttctcctcccccatgcccaacccctgtggccgccgcccctcccctgccccgttggtgtgattatttcatctgttagatgtggctgttttgcgtagcatcgtgtgccacccctgcccctccccgatccctgtgtgcgcgccccctctgcaatgtatgccccttgccccttccccacactaataatttatatatataaatatctatatgacgctcttaaaaaaacatcccaaccaaaaccaaccaaacaaaaacatcctcacaactccccagga

SEQ ID NO: 55 - DNA, 808 bp, Homo sapiens
tgctcccttgggctctagagaggaggcccctcttagccctcagcccctccttcctctctatcttaaagtaatttgatcctcaggaatttgttccgccctcatctggcccggccaaatcccgatttgacaaatgccaggaaaaggaaactgttgagaaaccgaaactactggggaaagggagggctcactgagtaaccatcccagtaacccgaccgccgctggtcttcgctggacaccatgagtcacactgtccaaaccttcttctctcctgtcaacagtggccagccccccaactatgagatgctcaaggaggagcacgaggtggctgtgctgggggggccccacaaccctgctcccccgacgtccaccgtgatccacatccgcagcgagacctccgtgcccgaccatgtcgtctggtccctgttcaacaccctcttcatgaacccctgctgcctgggcttcatagcattcgcctactccgtgaagtctagggacaggaagatggttggcgacgtgaccggggcccaggcctatgcctccaccgccaagtgcctgaacatctgggccctgattctgggcatcctcatgaccattctgctcatcgtcatcccagtgctgatcttccaggcctatggatagatcaggaggcatcactgaggccaggagctctgcccatgacctgtatcccacgtactccaacttccattcctcgccctgcccccggagccgagtcctgtatcagccctttatcctcacacgcttttctacaatggcattcaataaagtgcacgtgtttctggtgctgctg

SEQ ID NO: 56 - DNA, 3454 bp, Homo sapiens
ggaaatgactgctgtccatgcaggcaacataaacttcaagtgggatcctaaaagtctagagatcaggactctggcagttgagagactgttggagcctcttgttacacaggttacaacccttgtaaacaccaatagtaaagggccctctaataagaagagaggtcgttctaagaaggcccatgttttggctgcatctgttgaacaagcaactgagaatttcttggagaagggggataaaattgcaaaagagagccagtttctcaaggaggagcttgtggttgctgtagaagatgttcgaaaacaaggtgatttgatgaaggctgctgctggagagttcgcagatgatccctgctcttctgtgaagcgaggcaacatggttcgggcagctcgagctttgctctctgctgttacccggttgctcattttggctgacatggcagatgtctacaaattacttgttcagctgaaagttgtggaagatggtatattgaaactgaggaatgctggcaatgaacaagacttagggaatcagtataaagccctaaaacctgaagtggataagctgaacattatggcagcaaaaagacaacaggaattgaaagatgttgggcatcgtgatcagatggctgcggctagaggaatcctgcagagcaacgttccgatcctctatactgcatcccaggcatgcctacagcaccctgatgtcgcagcctataaggccaacagggacctgatatacaagcagctgcagcaggcggtcacagggatttccaatgcagcccaggccactgcctcagacgatgcctcacagcaccagggtggaggaggaggagaactggcatatgcactcaataactttgacaaacaaatcattgtggaccccttgagcttcagcgaggagcgctttaggccttccctggaggagcgtctggaaagcatcattagtggggctgccttgatggccgactcgtcctgcacgcgtgatgaccgtcgtgagcgaattgtggcagagtgtaatgctgtccgccaggcctgcaggacctgcgtttcggagtacatgggcaatgctggacgtaaagaaagaagtgatgcactcaattctgcaatagataaaatgaccaagaagaccagggacttgcgtagacagcttcgcaaagctgtcatggaccacgtttcagattctttcctggaaaccaatgttccacttttggtattgattgaagctgcaaagaatggaaatgagaaagaagttaaggaatatgcccaagttttccgtgaacatgccaacaaattgattgaggttgccaacttggcctgttccatctcaaataatgaagaaggtgtaaagcttgttcgaatgtctgcaagccagttagaagccggttgtcctcaggttattaatgctgcaacctgggctttagcaccaaaaccacagagtaaactggcccaagagaacatggatctttttaaagaacaatgggaaaaacaagtccgtgttctcacagatgctgtcgatgacattacttccattgatgacttcttggctgtctcagagaatcacattttggaagatgtgaacaaatgtgtcattgctctccaagagaaggatgtggatggcctggaccgcacagctggtgcaattcgaggccgggcagcccgggtcattcacgtagtcacctcagagatggacaactatgagccaggagtctacacagagaaggttctggaagccactaagctgctctccaacacagtcatgccacgttttactgagcaagtagaagcagccgtggaagccctcagctcggaccctgcccagcccatggatgagaatgagtttatcgatgcttcccgcctggtatatgatggcatccgggacatcaggaaagcagtgctgatgataaggacccctgaggagttggatgactctgactttgagacagaggattttgatgtcagaagcgagacgagcgtccagacagaagacgatcagctgatagctggccagagtgcccgggcgatcatggctcagcttccccaggagcaaaaagcgaagattcgggaacaggtggccagcttccaggaagaaaagagcaagctggatgctgaagtgtccaaatgggacgacagtggcaatgacatcattgtgctggccaagcagatgtgcatgattatgatggagatgacagactttacccgaggtaaaggaccactcaaaaatacatcggatgtcatcagtgctgccaagaaaattgctgaggcaggatccaggatggacaagcttggccggaccattcgagaccattgccccgactcggcttgcaagcaggacctgctggcctacctgcaacgcatcgccctctactgccaccagctgaacatctgcagcaaggtcaaggccgaggtgcagaatctcggcggggagcttgttgtctctggggtggacagcgccatgtccctgatccaggcagccaagaacttgatgaatgctgtggtgcagacagtgaaggcatcctacgtcgcctctaccaaataccaaaagtcacagggtatggcttccctcaaccttcctgctgtgtcaatgaagatgaaggcaccagagaaaaagccattggtgaagagagagaaacaggatgagacacagaccaagattaaacgggcatctcagaagaagcacgtgaacccagtgcaggccctcagcgagttcaaagctatggacagcatctaagtctgcccaggccggccgcccccacccctctggctcctgaatatcagtcactgttcgtcactcaaatgaatttgctaaatacaacactgatactagattccacagggaaatgggcagactgaaccagtccaggtggtgaattttccaagaacatagtttaagttgattaaaaatgcttttagaatgcaggagcctacttctagctgtattttttgtatgcttaaataaaataaaattcataaccaagagatccacattagcttgttagtaatgctctgaccaagccgagatgccattctcttagtgatggcggcgttaggtttgagagaaggaattggctcaacttcagttgagagggtgcagtccagacagcttgactgcttttaaatgaccaaagatgacctgtggtaagcaacctggcatcttaggaagcagtccttgagaaggcatgttccagaaaggtctctgaggacaaactcactcagtaaaacataatgtatcatgaagaaaactgattctctatgacatgaaatgaaaattttaatgcattgttataattactaatgtacgctgctgcaggacattaataaagttgcttttttaggctacagtgtctcgatgccataatcagaacacactttttttcctctttctcccagcttcaaatgcacaattcatcattgggctcacttctaataactgcagtgtttccgccttgcgttgcag

SEQ ID NO: 57 - DNA, 5128 bp, Homo sapiens
ccgagtgcctcgcagcccctcccgaggcgcagccgccagaccagtggagccggggcgcagggcgggggcggaggcgccggggcgggggatgcggggccgcggcgcagccccccggccctgagagcgaggacagcgccgcccggcccgcagccgtcgccgcttctccacctcggcccgtggagccggggcgtccgggcgtagccctcgctcgcctgggtcagggggtgcgcgtcgggggaggcagaagccatggatcccgggcagcagccgccgcctcaaccggccccccagggccaagggcagccgccttcgcagcccccgcaggggcagggcccgccgtccggacccgggcaaccggcacccgcggcgacccaggcggcgccgcaggcaccccccgccgggcatcagatcgtgcacgtccgcggggactcggagaccgacctggaggcgctcttcaacgccgtcatgaaccccaagacggccaacgtgccccagaccgtgcccatgaggctccggaagctgcccgactccttcttcaagccgccggagcccaaatcccactcccgacaggccagtactgatgcaggcactgcaggagccctgactccacagcatgttcgagctcattcctctccagcttctctgcagttgggagctgtttctcctgggacactgacccccactggagtagtctctggcccagcagctacacccacagctcagcatcttcgacagtcttcttttgagatacctgatgatgtacctctgccagcaggttgggagatggcaaagacatcttctggtcagagatacttcttaaatcacatcgatcagacaacaacatggcaggaccccaggaaggccatgctgtcccagatgaacgtcacagcccccaccagtccaccagtgcagcagaatatgatgaactcggcttcagccatgaaccagagaatcagtcagagtgctccagtgaaacagccaccacccctggctccccagagcccacagggaggcgtcatgggtggcagcaactccaaccagcagcaacagatgcgactgcagcaactgcagatggagaaggagaggctgcggctgaaacagcaagaactgcttcggcaggtgaggccacaggagttagccctgcgtagccagttaccaacactggagcaggatggtgggactcaaaatccagtgtcttctcccgggatgtctcaggaattgagaacaatgacgaccaatagctcagatcctttccttaacagtggcacctatcactctcgagatgagagtacagacagtggactaagcatgagcagctacagtgtccctcgaaccccagatgacttcctgaacagtgtggatgagatggatacaggtgatactatcaaccaaagcaccctgccctcacagcagaaccgtttcccagactaccttgaagccattcctgggacaaatgtggaccttggaacactggaaggagatggaatgaacatagaaggagaggagctgatgccaagtctgcaggaagctttgagttctgacatccttaatgacatggagtctgttttggctgccaccaagctagataaagaaagctttcttacatggttatagagccctcaggcagactgaattctaaatctgtgaaggatctaaggagacacatgcaccggaaatttccataagccagttgcagttttcaggctaatacagaaaaagatgaacaaacgtccagcaagatactttaatcctctattttgctcttccttgtccattgctgctgttaatgtattgctgacctctttcacagttggctctaaagaatcaaaagaaaaaaactttttatttcttttgctattaaaactactgttcattttgggggctgggggaagtgagcctgtttggatgatggatgccattccttttgcccagttaaatgttcaccaatcattttaactaaatactcagacttagaagtcagatgcttcatgtcacagcatttagtttgttcaacagttgtttcttcagcttcctttgtccagtggaaaaacatgatttactggtctgacaagccaaaaatgttatatctgatattaaatacttaatgctgatttgaagagatagctgaaaccaaggctgaagactgttttactttcagtattttcttttcctcctagtgctatcattagtcacataatgaccttgattttattttaggagcttataaggcatgagacaatttccatataaatatattaattattgccacatactctaatatagattttggtggataattttgtgggtgtgcattttgttctgttttgttgggttttttgttttttttgtttttggcagggtcggtgggggggttggttggttggttggttttgtcggaacctaggcaaatgaccatattagtgaatctgttaatagttgtagcttgggatggttattgtagttgttttggtaaaatcttcatttcctggttttttttaccaccttatttaaatctcgattatctgctctctcttttatatacatacacacacccaaacataacatttataatagtgtggtagtggaatgtatccttttttaggtttccctgctttccagttaatttttaaaatggtagcgctttgtatgcatttagaatacatgactagtagtttatatttcactggtagtttaaatctggttggggcagtctgcagatgtttgaagtagtttagtgttctagaaagagctattactgtggatagtgcctaggggagtgctccacgccctctgggcatacggtagatattatctgatgaattggaaaggagcaaaccagaaatggctttattttctcccttggactaatttttaagtctcgattggaattcagtgagtaggttcataatgtgcatgacagaaataagctttatagtggtttaccttcatttagctttggaagttttctttgccttagttttggaagtaaattctagtttgtagttctcatttgtaatgaacacattaacgactagattaaaatattgccttcaagattgttcttacttacaagacttgctcctacttctatgctgaaaattgaccctggatagaatactataaggttttgagttagctggaaaagtgatcagattaataaatgtatattggtagttgaatttagcaaagaaatagagataatcatgattatacctttatttttacaggaagagatgatgtaactagagtatgtgtctacaggagtaataatggtttccaaagagtattttttaaaggaacaaaacgagcatgaattaactcttcaatataagctatgaagtaatagttggttgtgaattaaagtggcaccagctagcacctctgtgttttaagggtctttcaatgtttctagaataagcccttattttcaagggttcataacaggcataaaatctcttctcctggcaaaagctgctatgaaaagcctcagcttgggaagatagatttttttccccccaattacaaaatctaagtattttggcccttcaatttggaggagggcaaaagttggaagtaagaagttttattttaagtactttcagtgctcaaaaaaatgcaatcactgtgttgtatataatagttcataggttgatcactcataataattgactctaaggcttttattaagaaaacagcagaaagattaaatcttgaattaagtctggggggaaatggccactgcagatggagttttagagtagtaatgaaattctacctagaatgcaaaattgggtatatgaattacatagcatgttgttgggattttttttaatgtgcagaagatcaaagctacttggaaggagtgcctataatttgccagtagccacagattaagattatatcttatatatcagcagattagctttagcttagggggagggtgggaaagtttggggggggggttgtgaagatttagggggaccttgatagagaactttataaacttctttctctttaataaagacttgtcttacaccgtgctgccattaaaggcagctgttctagagtttcagtcacctaagtacacccacaaaacaatatgaatatggagatcttcctttacccctcaactttaatttgcccagttatacctcagtgttgtagcagtactgtgatacctggcacagtgctttgatcttacgatgccctctgtactgacctgaaggagacctaagagtcctttccctttttgagtttgaatcatagccttgatgtggtctcttgttttatgtccttgttcctaatgtaaaagtgcttaactgcttcttggttgtattgggtagcattgggataagattttaactgggtattcttgaattgcttttacaataaaccaattttataatctttaaatttatcaactttttacatttgtgttattttcagtcagggcttcttagatctacttatggttgatggagcacattgatttggagtttcagatcttccaaagcactatttgttgtaataacttttctaaatgtagtgcctttaaaggaaaaatgaacacagggaagtgactttgctacaaataatgttgctgtgttaagtattcatattaaatacatgccttctatatggaacatggcagaaagactgaaaaataacagtaattaattgtgtaattcagaattcataccaatcagtgttgaaactcaaacattgcaaaagtgggtggcaatattcagtgcttaacacttttctagcgttggtacatctgagaaatgagtgctcaggtggattttatcctcgcaagcatgttgttataagaattgtgggtgtgcctatcataacaattgttttctgtatcttgaaaaagtattctccacattttaaatgttttatattagagaattctttaatgcacacttgtcaaatatatatatatagtaccaatgttacctttttattttttgttttagatgtaagagcatgctcatatgttaggtacttacataaattgttacattattttttcttatgtaatacctttttgtttgtttatgtggttcaaatatattctttccttaaaaaaaaaaaaaaaaaaaaaaaaaaaaaaaaaaaaaaa

SEQ ID NO: 58 - DNA, 1454 bp, Homo sapiens
aattgcttccggggagttgcgagggagcgagggggaataaaggacccgcgaggaagggcccgcggatggcgcgtccctgagggtcgtggcgagttcgcggagcgtgggaaggagcggaccctgctctccccgggctgcgggccatggccacggcggagcggagagccctcggcatcggcttccagtggctctctttggccactctggtgctcatctgcgccgggcaagggggacgcagggaggatgggggtccagcctgctacggcggatttgacctgtacttcattttggacaaatcaggaagtgtgctgcaccactggaatgaaatctattactttgtggaacagttggctcacaaattcatcagcccacagttgagaatgtcctttattgttttctccacccgaggaacaaccttaatgaaactgacagaagacagagaacaaatccgtcaaggcctagaagaactccagaaagttctgccaggaggagacacttacatgcatgaaggatttgaaagggccagtgagcagatttattatgaaaacagacaagggtacaggacagccagcgtcatcattgctttgactgatggagaactccatgaagatctctttttctattcagagagggaggctaataggtctcgagatcttggtgcaattgtttactgtgttggtgtgaaagatttcaatgagacacagctggcccggattgcggacagtaaggatcatgtgtttcccgtgaatgacggctttcaggctctgcaaggcatcatccactcaattttgaagaagtcctgcatcgaaattctagcagctgaaccatccaccatatgtgcaggagagtcatttcaagttgtcgtgagaggaaacggcttccgacatgcccgcaacgtggacagggtcctctgcagcttcaagatcaatgactcggtcacactcaatgagaagcccttttctgtggaagacacttatttactgtgtccagcgcctatcttaaaagaagttggcatgaaagctgcactccaggtcagcatgaacgatggcctctcttttatctccagttctgtcatcatcaccaccacacactgttctgacggttccatcctggccatcgccctgctgatcctgttcctgctcctagccctggctctcctctggtggttctggcccctctgctgcactgtgattatcaaggaggtccctccaccccctgccgaggagagtgaggaaaataaaataaaataacaagaagaagaaagaaagaaatcccacagaaacagataacctaacacagcccgtgcaacgtattttatacaatgctctgaaaatcatagtctcaatctagacagtcttttcctctagttccctgtattcaaatcccagtgtctaacattcaataaatagctatatgaaatcaaaaaaaaaaaaaaaaaaaaaaaaaaaaaaaaa

SEQ ID NO: 59 - DNA, 2828 bp, Homo sapiens
agcagccggcacggggacagccggccgcacaacggatctgcaggcgcggagcaaaatgcacccgccgcgccgcgcggtcctgcagccccgccacggccccgcggcccgcacccccccggggcgacagtgagcctctcccgccaccaccgggggccgagcggagggctctcgggtgggagagcgggaccagatctcgacagctgttcatttccaggaagccaccgcagccagagcgaaaggggaccttctgccaccagcggggcatcagccagcggcgcgcatggatttatgaagacactcatgcaagaagtgggcaggacttggacaaacttttccaccggctccgcgtccgccgctccccgcgcctcgtctcctttcccctcctctcccggcggccgccgctgcccgcgatggtggccgcgctgctgggcggcggcggcgaggcccgcggggggacagtgccgggcgcctggctgtgcctgatggcgctgctgcagctgctgggctcggcgccgcggggatcggggctggcgcacggccgccgcctcatctgctggcaggcgctgctgcagtgccagggggagccggagtgcagctacgcctacaaccagtacgccgaggcgtgcgcgccggtgctggcgcagcacggcgggggcgacgcgcccggggccgccgccgccgctttcccggcctcggccgcctctttctcgtcgcgctggcgctgcccgagtcactgcatctcggccctcattcagctcaaccacacgcgccgcgggcccgccctggaggactgtgactgcgcgcaggacgagaactgcaagtccaccaagcgcgccattgagccgtgcctgccccggacgagcggcggcggcgcgggcggccccggcgcgggcggggtcatgggctgcaccgaggcccggcggcgctgcgaccgcgacagccgctgcaacctggcgctgagccgctacctgacctactgcggcaaagtcttcaacgggctgcgctgcacggacgaatgccgcaccgtcattgaggacatgctggctatgcccaaggtggcgctgctcaacgactgcgtgtgcgacggcctcgagcggcccatctgcgagtcggtcaaggagaacatggcccgcctgtgcttcggcgccgagctgggcaacggccccggcagcagcggctcggacgggggcctggacgactactacgatgaggactacgatgacgagcagcgcaccgggggcgcgggtggtgagcagccgctggacgacgacgacggcgtcccgcacccaccgcgcccgggcagcggcgctgctgcatcgggcggccgcggggacctgccctatgggcctgggcgcaggagcagcggcggcggcggccgcttggcgccccggggcgcctggaccccactcgcctccatcttgctgctgctgcttgggccgctcttttagccctcgcgccccccgccgttggctgcgggagagcccgcgtcccactcccgtgctcgcctcgaccccgcgccgggcacctgtggcttgggacagatagaagggatggttggggatacttcccaaaactttttccaagtcaacttggtgtagccggttccccggccacgactctgggcacttcccctgaagctcctctccggagcttgacttcttggacctcctcccccgccccaattccaagctccagaaactcccaactcgtctgccgtccagaaagctagctgcagtgttcaggacgtccgggaggaagcaagcatgtgggggacagaacagtagtcctggactcgaaagggaaggtgctgaccagtggggccttagcaatttgaagggttgggaaggaggaattatatttgcaaaggggctgtctattagcatatttcctttgagggggcaaaaaaaagtgccagtatcgacttttacagattgtggccagtgaggatattataatcctatgtaaacagaaaagtcccacttaccgattcattctttcactgtttgtatctgcgcccagaattctcagtgacgtgggggtgagggtgggtggcgattgccttagagggaacccctaaattggttttggataagtttgagcccttgaccttaatttcattgctaccactctgatctcttagcacatttcttaggattaagggtccaaaaatgctgatctaaggggttgccatggtgttgaacaatgcaactttttatttaaaaaagctctgcactgccatgtatgaaagtctctttatgatgtttgtttttttgtcatttttgttctttacatcaagaaattttatgtttaaatatgcggagaatgtatattgcctctgctcctatcagggttgctaaaccctggtacatcgtatataaaatgtattaaaactggggtttgttaccagttgctgtactttgtatatagaatttttataaattgtatgcttcagaaataatttatttttaaaaagaaattaaaagttttaaactcacatccatattacacctttcccccctgaaatgtatagaatccatttgtcatcaggaatcaaaacccacagtccattgtgaagtgtgctatatttagaacagtcttaaaatgtacagtgtattttatagaattgaagttaacattcttattttcaagagaatttatggacgttgtagaaatgtacaaatgcatttccaaactgccttaaacgttgtatttttatagacatgtttttttaaaaatcctaagtttttaaataactatggatttgtgtattttttttggttatttgttttattaaaacatgtacatcagtaaagagttttaaacaatga

SEQ ID NO: 60 - DNA, 7568 bp, Homo sapiens
gcgcggaggcagggaaccggagccttggagcgacccaacccctcgtctcgctgccctcccgcgcctgcaacggtgcgcggagactccggcgaactcagacacccaacggcggagaacagaagcggcaggcggcggacgtggcccggaagctgcgcgccgaacgcagcgcacccgctgccgagcagaggagccgcgcctttccccgaccctcggctccagcccccggcgcctgccgcctcgcagcccctctgcgtcctcggctcgggggccggcaccggcgatgccgagcggacgctccagtcctccgacccgctgaagaagcagcagccgctcgcccggagcctacggggattgtgcgagcggatcgtgctcggtggaggctcgggctgcggggcgcggggactccggggggcggggggagggaccgctctgtcggtgcccggcgccagccgcggctttgaagggtctccctcccctgcccttagcagctctgccacggactccgggaggctgcgggcggcgtcctgagggctccccagcagacccaatcggacttgagaaggtgatcgctctgctctcccaacccccttccctccccattccccccacttaactttttgtctccgttcatccgcggcttcgtcccctccccggcagacccacccgcggctgtgacaaccgcccggggcatgggccccccaacacggctcctagaggccccgcggcctcgcaagatgtgagaggccctccccgggcagaatcggagcttcaggagaggagctaataccccgccccccgtccctcacatcaggcggggtggaggtgcgcgctgagcccccgcggtgctgagcgtcccggagcgcccaatcctgggctggaacgagtagctggccggaggcgcgccgcggagagccggctgtcatgccctattgatccccctctgccccccgccaagtatgtttgggctggaccaattcgagccccaggtcaacagcaggaacgctggccagggcgagaggaactttaacgagaccggactgagcatgaacacccactttaaggccccggctttccacactggggggccccctggccctgtggatcctgctatgagcgcgctggggcaacccccgatcttgggcatgaacatggagccctacggcttccacgcgcgcggccactcggagttgcacgcaggggggctgcaagcgcagcctgtgcacggcttctttggcggccagcagcctcaccacggccacccgggaagtcatcatccccaccagcatcacccccactttgggggcaacttcggtggcccggaccccggggcctcgtgcctgcacgggggtcgcctgctcggctacggcggcgcagccggaggcctgggcagccagccgcccttcgccgagggctatgagcacatggcggagagccaggggcctgagagcttcggcccgcagcgaccggggaacctcccggacttccacagttcaggtgcctccagccaccgcgtgccggccccatgcctgccgctggaccagagccctaaccgagccgcctccttccacggcctgccgtcctccagcggctccgattcccacagtctggagccacggagggtgacgaaccaaggagccgtcgactcgctggaatacaattaccgggcgaggcgccctcgggacattttgacatgttttcgccctctgactccgaagggcagctgcctcattatgcagcgggtcgccaggttcctggggggcggctttcccggggcgccctcggccatgcccagagctgcgggcatggtgggcttgtccaaaatgcacgcccagccaccgcagcagcagccccagcagcagcagcagccccagcagcagcagcagcatggtgtgttctttgagaggttcagtggggccagaaagatgcctgtgggtctggagccctcagtgggctccaggcacccgttaatgcagcctccccagcaggccccgccaccccctcagcagcagcccccgcagcagccgccacagcagcagccgccgccgccacccgggcttctagtccgacaaaattcgttgcccgcctgcgctccctcggccccagcagggcgaggcgggcacgcccagcggcggcctgcaggacggaggccccatgctgcccagccagcacgcgcaattcgagtatcccatccaccggctggagaaccggagcatgcacccttattccgagcctgttttcagcatgcagcatcctcctccgcagcaggcgcccaaccagcggctgcagcatttcgacgcgcccccctacatgaacgtggccaagaggcgcgcttcgactttccgggcagcgcgggagtggaccgctgcgcttcgtggaacggcagcatgcacaacggcgctctggataatcacctctccccttccgcctacccaggcctacccggcgagttcacaccgcctgtgcccgacagcttcccttcggggccgcccctgcagcatccggccccggaccaccagtccctgcaacagcagcagcagcagcagcagcagcagcaacagcagcagcagcagcagcaacagcaacagcaacagcagcagcagcagcagcgccaaaacgcggccctcatgattaagcagatggcgtcgcggaatcagcagcagcggctgcgccagcccaacctggctcagctaggccaccccggggacgtgggccagggcggcctggtgcatggcggcccggtgggcggcttggcccagccgaactttgagcgcgaaggcggcagcacgggcgccgggcgtctgggcaccttcgagcagcaggcgccgcacttggcgcaagagagcgcgtggttctcaggtccgcatccgccgcccggagacctgctgccccgtaggatgggcggctcgggtctgcccgctgactgtggcccgcacgaccccagcctggcgccccctcctccgcctggtggctcgggggtgctgttccggggccctctgcaggagccgatgaggatgcccggagaggccacgtgccgcgctgccttcaccggcctgcagttcgggggcagtctgggaggcctgggtcagctgcagtcgcccggggcgggcgtggggctccccagcgctgcttcggagcgccggcccccgccgccggactttgctacgtctgcgctcgggggccagccgggctttccgtttggtgcagccggccggcagtccacgccgcacagcggtccaggcgtgaactcgccccccagcgcgggagggggcggtggcagctctggtggcggcggtggcgggggtgcctacccgccgcagcctgatttccagcccagccagcgcacctcggccagtaaattgggcgcgctctcgctgggctccttcaacaagcccagctccaaggacaacctgttcggccagagctgcctggctgcgctctccaccgcttgccagaacatgatcgccagcctcggggcccccaacctcaacgtgaccttcaacaagaagaacccgccagagggcaagaggaaactgagccagaacgagaccgacggcgcggcagtggccggcaacccgggctcggattacttcccaggagggactgctcctgggggccccaggacccggaggccgtccgggaccagtagcagcggctccaaagcctcggggccgcccaaccctccagcccagggggacggcaccagcctctcccccaactacaccctggaatccacgtcggggaatgacggcaagccggtctccgggggcggcggccggggacggggtcgcagaaaaagggacagtggtcacgtgagccctggcaccttctttgacaagtactcggcggctccggacagcgggggcgcacctggggtgagcccagggcagcagcaagcgtcaggcgcagccgtcgggggaagctccgcaggcgagacgcgcggggcaccgacgccccacgaaaaggcgctcacgtcgccatcctgggggaagggggctgagttgctcctgggggatcagccggacctcattgggtccctggacggcggggccaagtcggacagtagttcgccaaacgtgggtgagttcgcctcggacgaggtgagcacgagctacgccaatgaggacgaggtgtcgtccagctctgacaacccccaggcactagttaaagcgagcaggagtcccctggtgaccggctcgcccaaactccctccccgtggggtaggcgccggggaacacggaccgaaggcgcccccgcccgccctcggcctgggcatcatgtctaactctacctcgacccctgacagctacggcggcggtgggggcccgggccatccgggcactccgggcctggagcaggtccgcaccccgacgagcagcagcggcgccccgccacccgacgagatccaccccctggagatccttcaggcgcagatccagctacagaggcagcagttcagcatctccgaggaccagcctctggggctgaagggtggcaagaagggtgagtgcgccgtcggggcctcaggggcgcagaatggcgacagcgagctgggcagctgctgctccgaggcggtcaagagcgccatgagcaccattgacctggactcgctgatggcagagcacagcgctgcctggtacatgcccgctgacaaggccctggtggacagcgcggacgacgacaagacgttggcgccctgggagaaggccaaaccccagaaccccaacagcaaagaagcccacgacctccctgcaaacaaggcctcagcatcccagcctggcagccacttgcagtgcctgtctgtccactgcacagacgacgtgggtgacgccaaggctcgagcctccgtgcccacctggcggtccctgcattctgacatctccaacagatttgggacattcgtggctgccctaacttgaatgacaagaaagatcccctcctctaccaggcccttcctctccccctgtctgtttccttccccctcaaccttaccccacccctctgttaatttgaaagggccactattgctgagtggatgagttttttttttttcctctaggttggtacctgcttagtggcatatggaccggaaagggttaatttaaagggggggaacctcaaaagtttttttaaaaaagaaacttgtctgccacagtatgttaccagtgttaacccttctgcagttagcaaacttttgcttaagcctttttcctctagatactccccatgtttcggtaatcttggcatacattttttagatgacctctttccttgttttgttttcatgctgctgtatgtccaagtattgttatttcataataagacaagagttgctttcttttttattctttttccttttcttaccccctccccttttattttctttttgctttgttcactgcttattaaaatggaaatcctggagaatagtagttctggaatattgccgggtgaaagtccaattgtcatcacaatgttatatattgacaccccagtgtcatcagtcaggcaggagccaaacaatgaatgcccctcttaggtattccgcctgggattttgttttgtctgttccctaagaaaatatattttcattcctgcaaacacagtgctcagccttcagttcccttccacttgagttctctcttctcctgctggaagccgcccctctctgcgatggacgtgaggacgtgtccagctctgctctgtgggaaggagttggaatgttcgacagcagtgttttctctccttttctgggcctcctcgcaaatgcccaggccctgcattttcacgctgtgctaagcagcctttggtctgcatgggggatggtgtgctcccagcctgcagtctttggagcaaggctgctgcccgtgccttgggtgctggagttggaggaggctgttctcagccctttcccttttctgaaagctgttcctggccgggcatcccagggaagaaggaggggactgcgtgtatctcctccacctctcccattccatccccagtccagcctgggcaaccccacccctgggagggatgaggcaccctcttgctcagcctgctcagccttctctgagcctttgcagggatctgcagactcctgagggctagaggacagagaaagagaatagaatgaaatgactttgattcctgcgccttttagttttgaactctggaattcctctgccccctccccaacatttttttggaatctcaccctgttgcaaaactagagccatgtcccaagcatctcacaaaggaataactgctctgagcagagatgagtggtggttggcaggggcaggcaactttgggtgctgctgatgcctgcaaaagccatttatggcttgtggtggggggcacatagattccccggtgggttagacaggaagtaactgatatcacttcacccaaatatataaccgtgatggttatctatttaatttcagtttttgttaacgagcgtgtcttactaaaacgctccactttgagctcccccaccccctccaggtcctcagagtttgcagatctgggctttctaaagcaagtgacctgaaggctctgggctcaccatacaacacccacgttgtttatttcaaagaacttttcagcgaagggagaggagctttcagaaaaacctcactctttcccctcccttctcccctctttccttctgccggtccttttggctggggtctgagtctgcggttctcgcctgggcagtcttgacgaggagcaaaccccgccttcagagggcagacaaagcaggtggcatgaattgatcagcgagaaaggtgtgagccgaggcagttcctgcgttctgctacaaaaggaatggaaagggaagggaatttccccccaccatgggctgtgggagagttgaccgtattctgggcaagactccatgacccctctgattctgcagtgtacagctgtttgagagcctcatcattttacttttgaaacaggaatgatttctccttaattgcttaaggccggggagcaaagtgtcttaacttctgtctttgactttcccagcgttgagtcatcaacactttgccaattagctcatggtcctggcaacctcagaaacccctgaagttttaaaaactttctcgctccccacgaccccagaatgaaacagctttaaaaatagccttaagcaaaaggatgttatttcattaaatttggtttaatggaaagaataaaagtaaatgaaaaacacaccctacacactagactccgaacactggtaatcagtactgcatagcaaactctttgggaaagaaaacgaaaatgttattgcacatgtaaaatatgaaaacttaactctgctgtgtgttaggcaatcctgtaatcttttttgactcttaaaagaaattcatttctgaaatgcttggttggaagactgtgacaatagctcatgaaattgagtgttatttttttctttcttttttaaaaaaatatgtaaagtgcagtcttctgtattcctgcatattgtatatacctgtatatgttttcctgagcagttaaataacaataaatatgacgttaatggtgaaaaaaaaaaaaaa

SEQ ID NO: 61 - DNA, 691 bp, Homo sapiens
gacccctcacactcacctagccaccatggacatcgccatccaccacccctggatccgccgccccttctttcctttccactcccccagccgcctctttgaccagttcttcggagagcacctgttggagtctgatcttttcccgacgtctacttccctgagtcccttctaccttcggccaccctccttcctgcgggcacccagctggtttgacactggactctcagagatgcgcctggagaaggacaggttctctgtcaacctggatgtgaagcacttctccccagaggaactcaaagttaaggtgttgggagatgtgattgaggtgcatggaaaacatgaagagcgccaggatgaacatggtttcatctccagggagttccacaggaaataccggatcccagctgatgtagaccctctcaccattacttcatccctgtcatctgatggggtcctcactgtgaatggaccaaggaaacaggtctctggccctgagcgcaccattcccatcacccgtgaagagaagcctgctgtcaccgcagcccccaagaaatagatgccctttcttgaattgcattttttaaaacaagaaagtttccccaccagtgaatgaaagtcttgtgactagtgctgaagcttattaatgctaagggcaggcccaaattatcaagctaataaaatatcattcagcaac

SEQ ID NO: 62 - DNA, 874 bp, Homo sapiens
gcggccgcgtcgaccgctgcgcctgttggggctgcacctcggaccagggcttctgctgcatctgcagccatgtcgggccgctcagtgccacatgcccacccggccaccgccgagtacgaatttgccaacccgagccgcctgggtgagcagcgcttcggagaaggcctcctgccagaagagatcctgacccccacactctaccatggctactatgtccggcctcgggccgccccagctggggagggcagcagggcaggggcctccgagcttaggctcagtgagggcaagttccaggcatttctggatgtgagccactttaccccagacgaggtgactgtgaggactgtggataacctgctggaggtgtctgcccggcacccccagcgcctggaccgccacggcttcgtgtcccgagagttctgccgcacctatgtcctgcctgctgatgtcgacccctggcgagtccgagctgctctctcccatgatggcatcttaaacctggaagcacctcggggtggccgacatttggacacagaggtcaatgaggtctacatctccctgctccctgcgcctcctgatccagaggaagaggaggaggcagccatagttgagccctgattgccacagacccagcacccagcaaatccctctctacctcccaaggtgatatgggcagctgcccaccactccagaggtagcagcatccttgggggaagggaaaggtgcatggtccacaatgtatggtttggtcccatgggacatgtcatagccttggtttagttttgggtggagctgaataaacccaaatttcagggcaaaaaaaaaaaaaaaaaagaaaaaaaaaaaaaaaaaaaaaaaaagtcgacgcggccgc

SEQ ID NO: 63 - DNA, 2569 bp, Homo sapiens
tccctcgtctctctcgggcaacatggcgggcgtggaggaggtagcggcctccgggagccacctgaatggcgacctggatccagacgacagggaagaaggagctgcctctacggctgaggaagcagccaagaaaaaaagacgaaagaagaagaagagcaaagggccttctgcagcaggggaacaggaacctgataaagaatcaggagcctcagtggatgaagtagcaagacagttggaaagatcagcattggaagataaagaaagagatgaagatgatgaagatggagatggcgatggagatggagcaactggaaagaagaagaaaaagaagaagaagaagagaggaccaaaagttcaaacagaccctccctcagttccaatatgtgacctgtatcctaatggtgtatttcccaaaggacaagaatgcgaatacccacccacacaagatgggcgaacagctgcttggagaactacaagtgaagaaaagaaagcattagatcaggcaagtgaagagatttggaatgattttcgagaagctgcagaagcacatcgacaagttagaaaatacgtaatgagctggatcaagcctgggatgacaatgatagaaatctgtgaaaagttggaagactgttcacgcaagttaataaaagagaatggattaaatgcaggcctggcatttcctactggatgttctctcaataattgtgctgcccattatactcccaatgccggtgacacaacagtattacagtatgatgacatctgtaaaatagactttggaacacatataagtggtaggattattgactgtgcttttactgtcacttttaatcccaaatatgatacgttattaaaagctgtaaaagatgctactaacactggaataaagtgtgctggaattgatgttcgtctgtgtgatgttggtgaggccatccaagaagttatggagtcctatgaagttgaaatagatgggaagacatatcaagtgaaaccaatccgtaatctaaatggacattcaattgggcaatatagaatacatgctggaaaaacagtgccgattgtgaaaggaggggaggcaacaagaatggaggaaggagaagtatatgcaattgaaacctttggtagtacaggaaaaggtgttgttcatgatgatatggaatgttcacattacatgaaaaattttgatgttggacatgtgccaataaggcttccaagaacaaaacacttgttaaatgtcatcaatgaaaactttggaacccttgccttctgccgcagatggctggatcgcttgggagaaagtaaatacttgatggctctgaagaatctgtgtgacttgggcattgtagatccatatccaccattatgtgacattaaaggatcatatacagcgcaatttgaacataccatcctgttgcgtccaacatgtaaagaagttgtcagcagaggagatgactattaaacttagtccaaagccacctcaacacctttattttctgagctttgttggaaaacatgataccagaattaatttgccacatgttgtctgttttaacagtggacccatgtaatacttttatccatgtttaaaaaagaaggaatttggacaaaggcaaaccgtctaatgtaattaaccaacgaaaaagctttccggacttttaaatgctaactgtttttccccttcctgtctaggaaaatgctataaagctcaaattagttaggaatgacttatacgttttgttttgaatacctaagagatactttttggatatttatattgccatattcttacttgaatgctttgaatgactacatccagttctgcacctataccctctggtgttgctttttaaccttcctggaatccattttctaaaaaataaagacacattcttctcagcaccacacaacacctattccaaaatcgaccacatatttggaagtaaagctctcctcagcaaatgtaaaagaacagaaattataacaaactgtctctcagaccacagtataaccaaactagaactcaggattaagaaactcactcaaaaccacacaactacatggaaactgaacaacctgctcctgaatgactactggatacataacaaaatgaaggcagaaataaagatgttctttaaaaccaatgagaacaaagacacaacataccagaatctctgggacacattcaaagcagtgtgtagagggaaatttatagcactaaatgcccacaagagaaagcaggaaatatctaaaattgacaccctaacatcacaattaaaagaactagagaagcaagagcaaacacattgaaaagctaagagaaggcaagaaataactaagatcagagcagaactgaaggaaatagagacacaaaaaactcttcaaaaaatcaatgaatccaggagctggttttttgaaacgatcaacaaaattgatagacactagcaagactaataaagaagaaaggagagaagaatcaaatagaagcaataaaaaatgataaaggggatatcaccaccaatcccacagaaataaaccaccatcagagaatactacaaacacctctacgcaa

SEQ ID NO: 64 - DNA, 3672 bp, Homo sapiens
acatgtgcatatttcattccccaggcagacattttttagaaatcaatacatgccccaatattggaaagacttgttcttccacggtgactacagtacatgctgaagcgtgccgtttcagccctcatttaattcaatttgtaagtagcgcacgagcctctgtgggggaggataggctgaaaaaaaaaagtgggctcgtatttatctacaggactccatatagtcatatataggcatataaatctatgctttttctttgtttttttctttcttcctttctttcaaaggtttgcattaacttttcaaagtagttcctataggggcattgaggagcttcctcattctgggaaaactgagaaaacccatattctcctaatacaacccgtaatagcatttttgcctgcctcgaggcagagtttcccgtgagcaataaactcagcttttttgtggggcacagtactggatttgacagtgattccccacgtgtgttcatctgcacccaccgagccaggcagaggccagccctccgtggtgcacacagcacgcgcctcagtccatcccattttagtctttaaaccctcaggaagtcacagtctccggacaccacaccacattgagcccaacaggtccacgatggatccacctagtcccaccccagcctttttctttcatctgaacagaatgtgcatttttggaagcctccctcactctccatgctggcagagcaggagggagactgaagtaagagatggcagagggagatggtggcaaaaaggtttagatgcaggagaacagtaagatggatggttccggccagagtcgatgtggggaggaacagagggctgaagggagagggggctgactgttccattctagctttggcacaaagcagcagaaagggggaaaagccaatagaaatttccttagcttccccaccatatgtattttcatggatttgagaggaaagagaggaaaatgggggaatgggttgcaaaatagaaatgagcttaatccaggccgcagagccagggaaggtgagtaaccttaggagggtgctagactttagaagccagataggaagaatcagtctaaactggccatgctttggaagggacaagactatgtgctccgctgcccaccttcagcctgcaatgagggactgaggcccacgagtctttccagctcttcctccattctggccagtccctgcatcctccctggggtggaggatggaaggaaagctgggacaagcagggaacgcatgattcagggatgctgtcactcggcagccagattccgaaactcccattctccaatgacttcctcaaccaatgggtggccttgtgactgttctttaaggctgaagatatccaggaaagggggcttggacactggccaaggagaccccttcgtgctgtggacacagctctcttcactctttgctcatggcatgacacagcggagaccgcctccaacaacgaatttggggctacgaagaggaatagcgaaaaagcaaatctgtttcaactgatgggaaccctatagctatagaacttgggggctatctcctatgcccctggacaggacagttggctggggacaggagaagtgctcaatcttcatgagacaaaggggcccgatcaaggcagccacaaggccttgacctgccgagtcagcatgccccatctctctcgacagctgtcccctaaacccaactcacgtttctgtatgtcttaggccagtatcccaaacctcttccacgtcactgttctttccacccattctccctttgcatcttgagcagttatccaactaggatctgccaagtggatactggggtgccactcccctgagaaaagactgagccaggaactacaagctccccccacattcctcccagcctggacctaattcttgagaggggctctctcttcacggactgtgtctggactttgagcaggcttctgccccttgcgttggctctttgctgccagccatcaggtgggggattagagcctggtgtaagtgcgccagactcttccggtttccaaagttcgtgcctgcgaacccaaacctgtgagtctcttctgcatgcaggagtttctcctgggcagctggtcactccccagagaagctgggccttcatggacacatggaactaagcctcccaaatgggagttctggctgagcccagggtggggagatcctgggaagggaggcactggaggaagacggcacctcttcccccatggcagggtgtgagggaggcaggtttggaatggtgcgagtatggcaatctaagcaggggtctggtctctttgactccaggctcgctttggccgactgtctgctcacccagagaccttggactccggactatccatggctccgaatctaagtgctgcccactcccatgctcacacccacagaaggtcttcccatcccctttagattcgtgcctcactccaccagtgaggaagatgcctctgtctttcccacgactgccaggagatagggaagcccagccaggactgaccctccttcctccagcctgccctgacccacctggcaaagcagggcacatggggaggaagagactggaacctttctttgacagccaggcctagacagacaggcctggggacactggcccatgaggggaggaaggcaggcgcacgaggtccagggaggcccttttctgatcatgccccttctctcccaccccatctccccaccaccacctctgtggcctccatggtacccccacagggctggcctcccctagagggtgggcctcaaccacctcgtcccgccacgcaccggttagtgagacagggctgccacgcaaccgccaagcccccctcaaggtgggacagtaccccggacccatccactcactcctgagaggctccggcccagaatgggaacctcagagaagagctctaaggagaagaaaccccatagcgtcagagaggatatgtctggcttccaagagaaaggaggctccgttttgcaaagtggaggagggacgagggacaggggtttcaccagccagcaacctgggccttgtactgtctgtgtttttaaaaccactaaagtgcaagaattacattgcactgtttctccactttttattttctcttaggcttttgtttctatttcaaacatactttcttggttttctaatggagtatatagtttagtcatttcacagactctggcctcctctcctgaaatccttttggatggggaaagggaaggtggggagggtccgaggggaaggggaccccagcttccctgtgcccgctcaccccactccaccagtccccggtcgccagccggagtctcctctctaccgccactgtcacaccgtagcccacatggatagcacagttgtcagacaagattccttcagattccgagttgctaccggttgttttcgttgttgttgttgttgtttttctttttctttttttttttgaagacagcaataaccacagtacatattactgtagttctctatagttttacatacattcataccataactctgttctctcctcttttttgttttcaactttaaaaacaaaaataaacgatgataatctttactggtgaaaaggatggaaaaataaatcaacaaatgcaaccagtttgtgagaaaaaaaaaaaaaa

SEQ ID NO: 65 - DNA, 1826 bp, Homo sapiens
agtctgcactggagctgcctggtgaccagaagtttggagtccgctgacgtcgccgcccagatggcctccaggctgaccctgctgaccctcctgctgctgctgctggctggggatagagcctcctcaaatccaaatgctaccagctccagctcccaggatccagagagtttgcaagacagaggcgaagggaaggtcgcaacaacagttatctccaagatgctattcgttgaacccatcctggaggtttccagcttgccgacaaccaactcaacaaccaattcagccaccaaaataacagctaataccactgatgaacccaccacacaacccaccacagagcccaccacccaacccaccatccaacccacccaaccaactacccagctcccaacagattctcctacccagcccactactgggtccttctgcccaggacctgttactctctgctctgacttggagagtcattcaacagaggccgtgttgggggatgctttggtagatttctccctgaagctctaccacgccttctcagcaatgaagaaggtggagaccaacatggccttttccccattcagcatcgccagcctccttacccaggtcctgctcggggctgggcagaacaccaaaacaaacctggagagcatcctctcttaccccaaggacttcacctgtgtccaccaggccctgaagggcttcacgaccaaaggtgtcacctcagtctctcagatcttccacagcccagacctggccataagggacacctttgtgaatgcctctcggaccctgtacagcagcagccccagagtcctaagcaacaacagtgacgccaacttggagctcatcaacacctgggtggccaagaacaccaacaacaagatcagccggctgctagacagtctgccctccgatacccgccttgtcctcctcaatgctatctacctgagtgccaagtggaagacaacatttgatcccaagaaaaccagaatggaaccctttcacttcaaaaactcagttataaaagtgcccatgatgaatagcaagaagtaccctgtggcccatttcattgaccaaactttgaaagccaaggtggggcagctgcagctctcccacaatctgagtttggtgatcctggtaccccagaacctgaaacatcgtcttgaagacatggaacaggctctcagcccttctgttttcaaggccatcatggagaaactggagatgtccaagttccagcccactctcctaacactaccccgcatcaaagtgacgaccagccaggatatgctctcaatcatggagaaattggaattcttcgatttttcttatgaccttaacctgtgtgggctgacagaggacccagatcttcaggtttctgcgatgcagcaccagacagtgctggaactgacagagactggggtggaggcggctgcagcctccgccatctctgtggcccgcaccctgctggtctttgaagtgcagcagcccttcctcttcgtgctctgggaccagcagcacaagttccctgtcttcatggggcgagtatatgaccccagggcctgagacctgcaggatcaggttagggcgagcgctacctctccagcctcagctctcagttgcagccctgctgctgcctgcctggacttgcccctgccacctcctgcctcaggtgtccgctatccaccaaaagggctcctgagggtctgggcaagggacctgcttctattagcccttctccatggccctgccatgctctccaaaccactttttgcagctttctctagttcaagttcaccagactctataaataaaacctgacagaccat

SEQ ID NO: 66 - DNA, 5489 bp, Homo sapiens
ggctgagttttatgacgggcccggtgctgaagggcagggaacaacttgatggtgctactttgaactgcttttcttttctcctttttgcacaaagagtctcatgtctgatatttagacatgatgagctttgtgcaaaaggggagctggctacttctcgctctgcttcatcccactattattttggcacaacaggaagctgttgaaggaggatgttcccatcttggtcagtcctatgcggatagagatgtctggaagccagaaccatgccaaatatgtgtctgtgactcaggatccgttctctgcgatgacataatatgtgacgatcaagaattagactgccccaacccagaaattccatttggagaatgttgtgcagtttgcccacagcctccaactgctcctactcgccctcctaatggtcaaggacctcaaggccccaagggagatccaggccctcctggtattcctgggagaaatggtgaccctggtattccaggacaaccagggtcccctggttctcctggcccccctggaatctgtgaatcatgccctactggtcctcagaactattctccccagtatgattcatatgatgtcaagtctggagtagcagtaggaggactcgcaggctatcctggaccagctggccccccaggccctcccggtccccctggtacatctggtcatcctggttcccctggatctccaggataccaaggaccccctggtgaacctgggcaagctggtccttcaggccctccaggacctcctggtgctataggtccatctggtcctgctggaaaagatggagaatcaggtagacccggacgacctggagagcgaggattgcctggacctccaggtatcaaaggtccagctgggatacctggattccctggtatgaaaggacacagaggcttcgatggacgaaatggagaaaagggtgaaacaggtgctcctggattaaagggtgaaaatggtcttccaggcgaaaatggagctcctggacccatgggtccaagaggggctcctggtgagcgaggacggccaggacttcctggggctgcaggtgctcggggtaatgacggtgctcgaggcagtgatggtcaaccaggccctcctggtcctcctggaactgccggattccctggatcccctggtgctaagggtgaagttggacctgcagggtctcctggttcaaatggtgcccctggacaaagaggagaacctggacctcagggacacgctggtgctcaaggtcctcctggccctcctgggattaatggtagtcctggtggtaaaggcgaaatgggtcccgctggcattcctggagctcctggactgatgggagcccggggtcctccaggaccagccggtgctaatggtgctcctggactgcgaggtggtgcaggtgagcctggtaagaatggtgccaaaggagagcccggaccacgtggtgaacgcggtgaggctggtattccaggtgttccaggagctaaaggcgaagatggcaaggatggatcacctggagaacctggtgcaaatgggcttccaggagctgcaggagaaaggggtgcccctgggttccgaggacctgctggaccaaatggcatcccaggagaaaagggtcctgctggagagcgtggtgctccaggccctgcagggcccagaggagctgctggagaacctggcagagatggcgtccctggaggtccaggaatgaggggcatgcccggaagtccaggaggaccaggaagtgatgggaaaccagggcctcccggaagtcaaggagaaagtggtcgaccaggtcctcctgggccatctggtccccgaggtcagcctggtgtcatgggcttccccggtcctaaaggaaatgatggtgctcctggtaagaatggagaacgaggtggccctggaggacctggccctcagggtcctcctggaaagaatggtgaaactggacctcaaggacccccagggcctactgggcctggtggtgacaaaggagacacaggaccccctggtccacaaggattacaaggcttgcctggtacaggtggtcctccaggagaaaatggaaaacctggggaaccaggtccaaagggtgatgccggtgcacctggagctccaggaggcaagggtgatgctggtgcccctggtgaacgtggacctcctggattggcaggggccccaggacttagaggtggagctggtccccctggtcccgaaggaggaaagggtgctgctggtcctcctgggccacctggtgctgctggtactcctggtctgcaaggaatgcctggagaaagaggaggtcttggaagtcctggtccaaagggtgacaagggtgaaccaggcggcccaggtgctgatggtgtcccagggaaagatggcccaaggggtcctactggtcctattggtcctcctggcccagctggccagcctggagataagggtgaaggtggtgcccccggacttccaggtatagctggacctcgtggtagccctggtgagagaggtgaaactggccctccaggacctgctggtttccctggtgctcctggacagaatggtgaacctggtggtaaaggagaaagaggggctccgggtgagaaaggtgaaggaggccctcctggagttgcaggaccccctggaggttctggacctgctggtcctcctggtccccaaggtgtcaaaggtgaacgtggcagtcctggtggacctggtgctgctggcttccctggtgctcgtggtcttcctggtcctcctggtagtaatggtaacccaggacccccaggtcccagcggttctccaggcaaggatgggcccccaggtcctgcgggtaacactggtgctcctggcagccctggagtgtctggaccaaaaggtgatgctggccaaccaggagagaagggatcgcctggtgcccagggcccaccaggagctccaggcccacttgggattgctgggatcactggagcacggggtcttgcaggaccaccaggcatgccaggtcctaggggaagccctggccctcagggtgtcaagggtgaaagtgggaaaccaggagctaacggtctcagtggagaacgtggtccccctggaccccagggtcttcctggtctggctggtacagctggtgaacctggaagagatggaaaccctggatcagatggtcttccaggccgagatggatctcctggtggcaagggtgatcgtggtgaaaatggctctcctggtgcccctggcgctcctggtcatccaggcccacctggtcctgtcggtccagctggaaagagtggtgacagaggagaaagtggccctgctggccctgctggtgctcccggtcctgctggttcccgaggtgctcctggtcctcaaggcccacgtggtgacaaaggtgaaacaggtgaacgtggagctgctggcatcaaaggacatcgaggattccctggtaatccaggtgccccaggttctccaggccctgctggtcagcagggtgcaatcggcagtccaggacctgcaggccccagaggacctgttggacccagtggacctcctggcaaagatggaaccagtggacatccaggtcccattggaccaccagggcctcgaggtaacagaggtgaaagaggatctgagggctccccaggccacccagggcaaccaggccctcctggacctcctggtgcccctggtccttgctgtggtggtgttggagccgctgccattgctgggattggaggtgaaaaagctggcggttttgccccgtattatggagatgaaccaatggatttcaaaatcaacaccgatgagattatgacttcactcaagtctgttaatggacaaatagaaagcctcattagtcctgatggttctcgtaaaaaccccgctagaaactgcagagacctgaaattctgccatcctgaactcaagagtggagaatactgggttgaccctaaccaaggatgcaaattggatgctatcaaggtattctgtaatatggaaactggggaaacatgcataagtgccaatcctttgaatgttccacggaaacactggtggacagattctagtgctgagaagaaacacgtttggtttggagagtccatggatggtggttttcagtttagctacggcaatcctgaacttcctgaagatgtccttgatgtgcagctggcattccttcgacttctctccagccgagcttcccagaacatcacatatcactgcaaaaatagcattgcatacatggatcaggccagtggaaatgtaaagaaggccctgaagctgatggggtcaaatgaaggtgaattcaaggctgaaggaaatagcaaattcacctacacagttctggaggatggttgcacgaaacacactggggaatggagcaaaacagtctttgaatatcgaacacgcaaggctgtgagactacctattgtagatattgcaccctatgacattggtggtcctgatcaagaatttggtgtggacgttggccctgtttgctttttataaaccaaactctatctgaaatcccaacaaaaaaaatttaactccatatgtgttcctcttgttctaatcttgtcaaccagtgcaagtgaccgacaaaattccagttatttatttccaaaatgtttggaaacagtataatttgacaaagaaaaatgatacttctctttttttgctgttccaccaaatacaattcaaatgctttttgttttatttttttaccaattccaatttcaaaatgtctcaatggtgctataataaataaacttcaacactctttatgataacaacactgtgttatattctttgaatcctagcccatctgcagagcaatgactgtgctcaccagtaaaagataacctttctttctgaaatagtcaaatacgaaattagaaaagccctccctattttaactacctcaactggtcagaaacacagattgtattctatgagtcccagaagatgaaaaaaattttatacgttgataaaacttataaatttcattgattaatctcctggaagattggtttaaaaagaaaagtgtaatgcaagaatttaaagaaatatttttaaagccacaattattttaatattggatatcaactgcttgtaaaggtgctcctcttttttcttgtcattgctggtcaagattactaatatttgggaaggctttaaagacgcatgttatggtgctaatgtactttcacttttaaactctagatcagaattgttgacttgcattcagaacataaatgcacaaaatctgtacatgtctcccatcagaaagattcattggcatgccacagggattctcctccttcatcctgtaaaggtcaacaataaaaaccaaattatggggctgcttttgtcacactagcatagagaatgtgttgaaatttaactttgtaagcttgtatgtggttgttgatcttttttttccttacagacacccataataaaatatcatattaaaattc

SEQ ID NO: 67 - DNA, 5222 bp, Homo sapiens
ttctgcccgccgccgccgctgccgagcgccgcctttgttccctgcaggaagggcgagcgcgcgggccagcgctcagccagcgcctcacgacccttcgtcctccgctaagctccaacgctctgctcgactagccgcgcgccttccggggctccgcagacccgcgagatggcaccaaggaggaacaacgggcagtgctggtgtctgctgatgctgctctcggtctccacgcccctccctgctgtcacccagacccgcggtgcgacagagactgcttcccagggtcacctggacctcacgcagctcatcggtgtcccgctgccctcgtccgtatcctttgtcacaggctatggtggcttcccggcctacagtttcgggcctggtgccaatgttggccgcccagccaggactctcatcccatccaccttcttcagggacttcgccatcagggtcgtggtgaagcccagcagcacccgtggtggcgtgctcttcgccatcactgacgccttccagaaggtcatctacctgggcctgcggctctcaggtgtggaggacggccaccagcggatcatcctctactacacggagccaggctcccatgtgtcccaagaagctgctgccttctcggtgcctgtgatgacccacaggtggaaccgcttcgccatgattgtccagggtgaggaagtgaccctcctcgtgaactgtgaggagcacagccgcatccccttccagcggtcctcccaggctttggcttttgagtccagcgctggaatcttcatgggcaatgcaggagctacagggctcgagagattcactggctccctccagcagctcaccgtgcaccccgaccccaggactcccgaggagctgtgtgaccctgaagagtcctcggcatctggagagaccagtgggctgcaggaggcagacggagtagctgagatcttagaagccgtcacctacactcaagcctcgcccaaagaagcaaaagttgaacccataaacacacctccaactccatcctccccctttgaagacatggaactttctggtgaacctgtacccgaggggaccctggaaaccaccaacatgagcatcatccagcacagcagccccaaacaagggtctggtgagatcctgaatgacacactggagggggttcattctgtggatggtgaccccattactgacagcggctcaggggctggggccttccttgacattgctgaagaaaagaatttagcagcaacagcagcggggctggccgaggtgcccatcagcactgctggagaagcagaggccagcagtgtgcccaccgggggaccaaccctctctatgtccacggagaacccagaggaaggggtcactccaggtccagataatgaagagcgtttacgagcaacagcagcaggggaggccgaggcactcgccagcatgcctggggaagtggaggccagtggtgtggcccccggggagctggacctctccatgtccgcccagagcctcggggaagaggccactgtgggtccaagcagtgaagacagtttaacaacagctgcagctgcaaccgaagtgtccctcagtacttttgaggatgaggaagccagtggggtccccacagatggcctggctcccctcacagccaccatggcccctgagcgggcagtcacttctggtcctggtgatgaagaagacttggcagcagccacaacagaggagcccctcatcacagctgggggtgaagagtccggcagccctccccctgatgggccaccgctgcccctgcccacagtggctcctgaaagatggatcactccagctcaaagagaacatgtgggaatgaaaggacaggctgggcccaaaggagaaaagggtgatgctggggaggagcttcctggccctcctgaaccttctgggcctgttggacccacggcaggagcagaagcagagggctctggcctaggctggggctcggacgtcggctctggctctggtgacctggtgggcagtgagcagctgctgagaggtcctccaggacccccagggccacctggcttacctgggattccaggaaaaccaggaactgatgttttcatgggaccccctggatctcctggagaggatggacctgctggtgaacctgggcccccgggccctgagggacagcctggagttgatggagccaccggccttcccgggatgaaaggggagaagggagcaagagggcctaatggctcagttggtgaaaagggtgaccctggcaacagaggcttacctggacccccggggaaaaagggacaagctggccctcctggggtcatgggacccccagggcctcctggaccccctgggcccccaggccctggatgcacaatgggacttggattcgaggataccgaaggctctggaagcacccagctattgaatgaacccaaactctccagaccaacggctgcaattggtctcaaaggagagaaaggagaccggggacccaagggagaaagggggatggatggagccagtattgtgggaccccctgggccgagagggccacctgggcacatcaaggtcttgtctaattccttgatcaatatcacccatggattcatgaatttctcggacattcctgagctggtggggcctccggggccggacgggttgcctgggctgccaggatttccaggtcctagaggaccaaaaggtgacactggtttacctggctttccaggactaaaaggagaacagggcgagaagggagagccgggtgccatcctgacagaggacattcctctggaaaggctgatggggaaaaagggtgaacctggaatgcatggagccccaggaccaatggggcccaaaggaccaccaggacataaaggagaatttggccttcccgggcgacctggtcgcccaggactgaatggcctcaagggtaccaaaggagatccaggggtcattatgcagggcccacctggcttacctggccctccaggcccccctgggccacctggagctgtgattaacatcaaaggagccattttcccaatacccgtccgaccacactgcaaaatgccagttgatactgctcatcctgggagtccagagctcatcacttttcacggtgttaaaggagagaaaggatcctggggtcttcctggctcaaagggagaaaaaggcgaccagggagcccagggaccaccaggtcctccacttgatctagcttacctgagacactttctgaacaacttgaagggggagaatggagacaaggggttcaaaggtgaaaaaggagaaaaaggagacattaatggcagcttccttatgtctgggcctccaggcctgcccggaaatccaggcccggctggccaaaaaggggagacagtcgttgggccccaaggacccccaggtgctcctggtctgcctgggccacctggctttggaagacctggtgatcctgggccaccggggcccccggggccaccaggacctccagctatcctgggagcagctgtggcccttccaggtccccctggccctccaggacagccagggcttcccggatccagaaacctggtcacagcattcagcaacatggatgacatgctgcagaaagcgcatttggttatagaaggaacattcatctacctgagggacagcactgagtttttcattcgtgttagagatggctggaaaaaattacagctgggagaactgatccccattcctgccgacagccctccaccccctgcgctttccagcaacccacatcagcttctgcctccaccaaaccctatttcaagtgccaattatgagaagcctgctctgcatttggctgctctgaacatgccattttctggggacattcgagctgattttcagtgcttcaagcaggccagagctgcaggactgttgtccacctaccgagcattcttatcttcccatttgcaagatctgtccaccattgtgaggaaagcagagagatacagccttcccatagtgaacctcaagggccaagtactttttaataattgggactcaattttttctggccacggaggtcagttcaatatgcatattccaatatactcctttgatggtcgagacataatgacagatccttcttggccccagaaagtcatttggcatggctccagcccccatggcgtccgccttgtggataactactgtgaagcatggcgaaccgcggacacagcggtcacgggacttgcctccccgctgagcacggggaagattctggaccagaaagcatacagctgtgctaatcggctaattgtcctatgtatcgaaaacagtttcatgacagacgctaggaagtaatggccttctgatgattcttaaagagttttcaattttttcttatgtgaagagttgacactgaaatctaaaatgtttaattgttgtaaatattacagtttttttttttttactacatattctttacaacagcaaccaaagaaaacatacctcaatacactcaaaactgaagacatagaggactcagatcaaagacaaaatctgatccatatattggtgctagattctgcaggaaaccccagcagtgtgaacgcatcccaacataggttaagagcaagttgaaaacaaaggccagattctgccactgcatccttcagacagttatatcctccttttaaaccattgttgttgagtgtaagatgtccttcatgttttcttataaagtcagtgtttagaaatgttaccctttctaagttatatacagatcaaatgcttttttctttcacgtacatccatcatttgcaactgctgttcgtacacagaaacaggactgctcaaatgatcctatttgtattttctgatgctatcagactctaatgtttttttccctaaaatattattgccatcatgctttaggaatttttatatttttacacaatcatattttagtatggtgtctgtttatgtaactctgacttgctggaaaagttgaaactccaaataatctgaaactagaaaagaaatagcacataattactaccttccccttggcggctctcctcccccaacccccaccccacaattttatgacttccatttggcaattgttgaattataactgcgactgaaacaaacaggttcatagagatgaattttctgagaaacatatatctacatgttgtataattggattttttttccatgtaagtgaacataaaaacatcttttccggg

SEQ ID NO: 68 - DNA, 4079 bp, Homo sapiens
ggagcggcgggcgggcgggagggctggcggggcgaacgtctgggagacgtctgaaagaccaacgagactttggagaccagagacgcgcctggggggacctggggcttggggcgtgcgagatttcccttgcattcgctgggagctcgcgcagggatcgtcccatggccggggctcggagccgcgacccttggggggcctccgggatttgctacctttttggctccctgctcgtcgaactgctcttctcacgggctgtcgccttcaatctggacgtgatgggtgccttgcgcaaggagggcgagccaggcagcctcttcggcttctctgtggccctgcaccggcagttgcagccccgaccccagagctggctgctggtgggtgctccccaggccctggctcttcctgggcagcaggcgaatcgcactggaggcctcttcgcttgcccgttgagcctggaggagactgactgctacagagtggacatcgaccagggagctgatatgcaaaaggaaagcaaggagaaccagtggttgggagtcagtgttcggagccaggggcctgggggcaagattgttacctgtgcacaccgatatgaggcaaggcagcgagtggaccagatcctggagacgcgggatatgattggtcgctgctttgtgctcagccaggacctggccatccgggatgagttggatggtggggaatggaagttctgtgagggacgcccccaaggccatgaacaatttgggttctgccagcagggcacagctgccgccttctcccctgatagccactacctcctctttggggccccaggaacctataattggaaggggttgctttttgtgaccaacattgatagctcagaccccgaccagctggtgtataaaactttggaccctgctgaccggctcccaggaccagccggagacttggccctcaatagctacttaggcttctctattgactcggggaaaggtctggtgcgtgcagaagagctgagctttgtggctggagccccccgcgccaaccacaagggtgctgtggttatcctgcgcaaggacagcgccagtcgcctggtgcccgaggttatgctgtctggggagcgcctgacctccggctttggctactcactggctgtggctgacctcaacagtgatggctggccagacctgatagtgggtgccccctacttctttgagcgccaagaagagctggggggtgctgtgtatgtgtacttgaaccaggggggtcactgggctgggatctcccctctccggctctgcggctcccctgactccatgttcgggatcagcctggctgtcctgggggacctcaaccaagatggctttccagatattgcagtgggtgccccctttgatggtgatgggaaagtcttcatctaccatgggagcagcctgggggttgtcgccaaaccttcacaggtgctggagggcgaggctgtgggcatcaagagcttcggctactccctgtcaggcagcttggatatggatgggaaccaataccctgacctgctggtgggctccctggctgacaccgcagtgctcttcagggccagacccatcctccatgtctcccatgaggtctctattgctccacgaagcatcgacctggagcagcccaactgtgctggcggccactcggtctgtgtggacctaagggtctgtttcagctacattgcagtccccagcagctatagccctactgtggccctggactatgtgttagatgcggacacagaccggaggctccggggccaggttccccgtgtgacgttcctgagccgtaacctggaagaacccaagcaccaggcctcgggcaccgtgtggctgaagcaccagcatgaccgagtctgtggagacgccatgttccagctccaggaaaatgtcaaagacaagcttcgggccattgtagtgaccttgtcctacagtctccagacccctcggctccggcgacaggctcctggccaggggctgcctccagtggcccccatcctcaatgcccaccagcccagcacccagcgggcagagatccacttcctgaagcaaggctgtggtgaagacaagatctgccagagcaatctgcagctggtccacgcccgcttctgtacccgggtcagcgacacggaattccaacctctgcccatggatgtggatggaacaacagccctgtttgcactgagtgggcagccagtcattggcctggagctgatggtcaccaacctgccatcggacccagcccagccccaggctgatggggatgatgcccatgaagcccagctcctggtcatgcttcctgactcactgcactactcaggggtccgggccctggaccctgcggagaagccactctgcctgtccaatgagaatgcctcccatgttgagtgtgagctggggaaccccatgaagagaggtgcccaggtcaccttctacctcatccttagcacctccgggatcagcattgagaccacggaactggaggtagagctgctgttggccacgatcagtgagcaggagctgcatccagtctctgcacgagcccgtgtcttcattgagctgccactgtccattgcaggaatggccattccccagcaactcttcttctctggtgtggtgaggggcgagagagccatgcagtctgagcgggatgtgggcagcaaggtcaagtatgaggtcacggtttccaaccaaggccagtcgctcagaaccctgggctctgccttcctcaacatcatgtggcctcatgagattgccaatgggaagtggttgctgtacccaatgcaggttgagctggagggcgggcaggggcctgggcagaaagggctttgctctcccaggcccaacatcctccacctggatgtggacagtagggataggaggcggcgggagctggagccacctgagcagcaggagcctggtgagcggcaggagcccagcatgtcctggtggccagtgtcctctgctgagaagaagaaaaacatcaccctggactgcgcccggggcacggccaactgtgtggtgttcagctgcccactctacagctttgaccgcgcggctgtgctgcatgtctggggccgtctctggaacagcacctttctggaggagtactcagctgtgaagtccctggaagtgattgtccgggccaacatcacagtgaagtcctccataaagaacttgatgctccgagatgcctccacagtgatcccagtgatggtatacttggaccccatggctgtggtggcagaaggagtgccctggtgggtcatcctcctggctgtactggctgggctgctggtgctagcactgctggtgctgctcctgtggaagatgggattcttcaaacgggcgaagcaccccgaggccaccgtgccccagtaccatgcggtgaagattcctcgggaagaccgacagcagttcaaggaggagaagacgggcaccatcctgaggaacaactggggcagcccccggcgggagggcccggatgcacaccccatcctggctgctgacgggcatcccgagctgggccccgatgggcatccagggccaggcaccgcctaggttcccatgtcccagcctggcctgtggctgccctccatcccttccccagagatggctccttgggatgaagagggtagagtgggctgctggtgtcgcatcaagatttggcaggatcggcttcctcaggggcacagacctctcccacccacaagaactcctcccacccaacttccccttagagtgctgtgagatgagagtgggtaaatcagggacagggccatggggtagggtgagaagggcaggggtgtcctgatgcaaaggtggggagaagggatcctaatcccttcctctcccattcaccctgtgtaacaggaccccaaggacctgcctccccggaagtgccttaacctagagggtcggggaggaggttgtgtcactgactcaggctgctccttctctagtttcccctctcatctgaccttagtttgctgccatcagtctagtggtttcgtggtttcgtctatttattaaaaaatatttgagaacaaaaaaaaaaaaaaaaaa

SEQ ID NO: 69 - DNA, 6276 bp, Homo sapiens
gagtgtggctgcagtgcgccgggacaccagggctccgcgctccgcactcaagaggctcccgcgtcccaacccctcgcgcccgcgcgttcgcggatccaggccgaggaccgaaaggggccgcccgagcccccggggccggcgcccagagagcccagcaaggccggccgccctgccggtgtgccgccggcgggtgcttctggaagggccaatgcgttcgggcagcagccctgaagccgagcccgaggctaagtgggactgaccggggcccagagtggacgaaccgccagcatggggagagaccagcgcgcggtggccggccctgccctacggcggtggctgctgctggggacagtgaccgtggggttcctcgcccagagcgtcttggcgggtgtgaagaagtttgatgtgccgtgtggaggaagagattgcagtgggggctgccagtgctaccctgagaaaggtggacgtggtcagcctgggccagtgggcccccaggggtacaatgggccaccaggattacaaggattccccgggctgcagggacgtaaaggagacaagggtgaaaggggagcccccggagtaacaggacccaagggcgacgtgggagcaagaggcgtttctggattccctggtgccgatggaattcctggacacccggggcaaggtgggcccaggggaaggccgggctacgatggctgcaacggaacccagggagactcaggtccacaggggccccccggctctgaggggttcaccgggcctcccgggccccaaggaccaaaagggcagaaaggtgagccttatgcactgcctaaagaggagcgcgacagatatcggggtgaacctggagagcctggattggtcggtttccagggacctcccggccgccctgggcatgtgggacagatgggtccagttggagctccagggagaccaggaccacctggaccccctggaccaaaaggacagcaaggcaacagaggacttggtttctacggagttaagggtgaaaagggtgacgtagggcagccgggacccaacgggattccatcagacaccctccaccccatcatcgcgcccacaggagtcaccttccacccagatcagtacaagggtgaaaaaggcagtgagggggaaccaggaataagaggcatttccttgaagggagaagaaggaatcatgggctttcctggacttaggggttaccctggcttgagtggtgaaaaaggatcaccaggacagaagggaagccgaggcctggatggctatcaagggcctgatggaccccggggacctaagggagaagccggagacccagggccccctggactacctgcctactcccctcacccttccctagcaaaaggtgccagaggtgacccaggattcccaggggcccaaggggagccaggaagccagggtgagccaggagacccgggcctcccaggtccccctggcctctccattggagatggagatcagaggagaggcctgccgggtgagatgggacccaagggcttcatcggagaccccggcatccctgcgctctacgggggcccacctggacctgatggaaagcgagggcctccaggaccccccgggctccctggaccacctggacctgatggcttcctgtttgggctgaaaggagcaaaaggaagagcaggcttccctgggcttcccggctcccctggagcccccggaccaaaggggtggaaaggtgacgctggggaatgcagatgtacagaaggcgacgaagctatcaaaggtcttccaggactgccaggacccaagggcttcgcaggcatcaacggggagccggggaggaaaggggacaaaggagaccccggccaacacggcctccctgggttcccagggctcaagggagtgcctggcaacattggtgctcccggacccaaaggagcaaaaggagattccagaacaatcacaaccaaaggtgagcggggacagcccggcgtcccaggtgtgcccgggatgaaaggtgacgatggcagcccaggccgcgatgggctcgatggattccccggcctcccaggccctcccggtgatggcatcaagggccctccaggggacccaggttatccaggaatacctggaacgaagggtactccaggagaaatgggccccccaggactgggccttcccggcctcaaaggccaacgtggtttccctggagacgccggcttacctggaccaccaggcttcctgggccctcctggccccgcagggaccccaggacaaatagattgtgacacagatgtgaaaagggccgttggaggtgacagacaggaggccatccagccaggttgcataggagggcccaagggattgccaggcctgccaggacccccaggccccacaggtgccaaaggcctccgaggaatcccaggcttcgcaggagctgatggaggaccagggcccaggggcttgccaggagacgcaggtcgtgaagggttcccaggacccccagggttcataggaccccgaggatccaaaggtgcagtgggcctccctggcccagatggatccccaggtcccatcggcctgccagggccagatgggccccctggggaaaggggcctccctggagaagtcctgggagctcagcccgggccacggggagatgctggtgtgcctggacagcctgggcttaaaggccttcccggagacagaggcccccctggattcagaggaagccaagggatgcctgggatgccagggctgaagggccagccaggcctcccaggaccttccggccagccaggcctgtatgggcctccaggactgcatggattcccaggagctcctggccaagaggggcccttggggctgccaggaatcccaggccgtgaaggtctgcctggtgatagaggggaccctggggacacaggcgctcctggccctgtgggcatgaaaggtctctctggtgacagaggagatgctggcttcacaggggagcaaggccatccaggaagccctggatttaaaggaattgatggaatgcctgggacccccgggctaaaaggagatagaggctcacctgggatggatggtttccaaggcatgcctggactcaaagggagacccgggtttccagggagcaaaggcgaggctggatttttcggaatacccggtctgaagggtctggctggtgagccaggttttaaaggcagccgaggggaccctgggcccccaggaccacctcctgtcatcctgccaggaatgaaagacattaaaggagagaaaggagatgaagggcctatggggctgaaaggatacctgggcgcaaaaggtatccaaggaatgccaggcatcccagggctgtcaggaatccctgggctgcctgggaggcccggccacatcaaaggagtcaagggagacatcggagtccccggcatccccggtttgccaggattccctggggtggctggcccccctggaattacgggattcccaggattcataggaagccggggtgacaaaggtgccccagggagagcaggcctgtatggcgagattggcgcgactggtgatttcggtgacatcggggacactataaatttaccaggaagaccaggcctgaagggggagcggggcaccactggaataccaggtctgaagggattctttggagagaagggaacagaaggtgacatcggcttccctgggataacaggcgtgactggagtccaaggccctcctggacttaaaggacaaacaggctttccagggctgactgggcctccagggtcgcagggagagctggggcggattggactgcctggtggcaaaggagatgatggctggccgggagctccgggcttaccaggttttccgggactccgtgggatccgcggcttacacggcttgccaggcaccaagggctttccaggatccccaggttctgacatccacggagacccaggcttcccaggccctcctggggaaagaggtgacccaggagaggccaacacccttccaggccctgtgggagtcccaggacagaaaggagaccaaggagctccaggggaacgaggcccacctgggagcccaggacttcaggggttcccaggcatcacacccccttccaacatctctggggcacctggtgacaaaggggcgccagggatatttggcctgaaaggttatcggggcccaccagggccaccaggttctgctgctcttcctggaagcaaaggtgacacagggaacccaggagctccaggaaccccagggaccaaaggatgggccggggactccgggccccagggcaggcctggtgtgtttggtctcccaggagaaaaagggcccaggggtgaacaaggcttcatggggaacactggacccaccggggcggtgggcgacagaggccccaagggacccaagggagacccaggattccctggtgcccccgggactgtgggagcccccgggattgcaggaatcccccagaagattgccgtccaaccagggacagtgggtccccaggggaggcgaggcccccctggggcaccgggggagatggggccccagggcccccccggagaaccaggttttcgtggggctccagggaaagctgggccccaaggaagaggtggtgtgtctgctgttcccggcttccggggagatgaaggacccataggccaccaggggccgattggccaagaaggtgcaccaggccgtccagggagcccgggcctgccgggtatgccaggccgcagcgtcagcatcggctacctcctggtgaagcacagccagacggaccaggagcccatgtgcccggtgggcatgaacaaactctggagtggatacagcctgctgtacttcgagggccaggagaaggcgcacaaccaggacctggggctggcgggctcctgcctggcgcggttcagcaccatgcccttcctgtactgcaaccctggtgatgtctgctactatgccagccggaacgacaagtcctactggctctctaccactgcgccgctgcccatgatgcccgtggccgaggacgagatcaagccctacatcagccgctgttctgtgtgtgaggccccggccatcgccatcgcggtccacagtcaggatgtctccatcccacactgcccagctgggtggcggagtttgtggatcggatattccttcctcatgcacacggcggcgggagacgaaggcggtggccaatcactggtgtcaccgggcagctgtctagaggacttccgcgccacaccattcatcgaatgcaatggaggccgcggcacctgccactactacgccaacaagtacagcttctggctgaccaccattcccgagcagagcttccagggctcgccctccgccgacacgctcaaggccggcctcatccgcacacacatcagccgctgccaggtgtgcatgaagaacctgtgagccggcgcgtgccaggaagggccattttggtgcttattcttaacttattacctcaggtgccaacccaaaaattggctttatttttttcttaaaaaaaaaaaagtctaccaaaggaatttgcatccagcagcagcacttagacctgccagccactgtcaccgagcgggtgcaagcactcggggtccctggagggcaagccctgcccacagaaagccaggagcagccctggcccccatcagccctgctagacgcaccgcctgaaggcacagctaaccacttcgcacacacccatgtaaccactgcactttccaatgccacagacaactcacattgttcaactcccttctcggggtgggacagacgagacaacagcacacaggcagccagccgtggccagaggctcgaggggctcaggggctcaggcacccgtccccacacgagggccccgtgggtgggcctggccctgctttctacgccaatgttatgccagctccatgttctcccaaataccgttgatgtgaattattttaaaggcaaaaccgtgctctttattttagaaaacactgataatcacactgcggtaggtcattcttttgccacatccctatagaccactgggtttggcaaaactcaggcagaagtggagacccttctagacatcactgtcagccttgctacttgaaggtacaccccatagggtcggaggtgctgtccccactgccccacgttgtccctgagatttaacccctccactgctgggggtgagctgtactcttctgactgccccctcctgtgtaacgactacaaaataaaacttggttctgaatatttttaaaaaaaaaaaaaaaa

SEQ ID NO: 70 - DNA, 1018 bp, Homo sapiens
ggcacgaggctcaagattcacagcatctcagacgcagcctaggttcccatggacttgtcataagacaaaagaggacagctgtgctgagggggcagggtctgcagcctcctggctgtgccaggaccacacctaccaaggccgcaccaggatgtcggacaccgaggagcaggaatatgaggaggagcagccggaagaggaggctgcggaggaggaggaggaagaagaggaacgccccaaaccaagccgccccgtggtgcctcctttgatcccgccaaagatcccagaaggggagcgcgttgacttcgatgacatccaccgcaagcgcatggagaaagacctgctggagctgcagacactcatcgatgtacatttcgagcagcggaagaaggaggaagaggagctggttgccttgaaggagcgcattgagcggcgccggtcagagagagccgagcaacagcgcttcagaactgagaaggaacgcgaacgtcaggctaagctggcggaggagaagatgaggaaggaagaggaagaggccaagaagcgggcagaggatgatgccaagaaaaagaaggtgctgtccaacatgggggcccattttggcggctacctggtcaaggcagaacagaagcgtggtaagcggcagacggggcgggagatgaaggtgcgcatcctctccgagcgtaagaagcctctggacattgactacatgggggaggaacagctccgggagaaagcccaggagctgtcggactggatccaccagctggagtctgagaagttcgacctgatggcgaagctgaaacagcagaaatatgagatcaacgtgctgtacaaccgcatcagccacgcccagaagttccggaagggggcagggaagggccgcgttggaggccgctggaagtgaggatgccgccccggacagtggcacctgggaagcctgggagtgtttgtcccatcggtagcttgaaataaacgctcccctcagacactcaaaaaaaaaaaaaaaaaaaaaaaaaaa

SEQ ID NO: 71 - DNA, 2895 bp, Homo sapiens
ccgaggagcgctcgggctgtctgcggaccctgccgcgtgcaggggtcgcggccggctggagctgggagtgaggcggcggaggagccaggtgaggaggagccaggaaggcagttggtgggaagtccagcttgggtccctgagagctgtgagaaggagatgcggctgctgctggccctgttgggggtcctgctgagtgtgcctgggcctccagtcttgtccctggaggcctctgaggaagtggagcttgagccctgcctggctcccagcctggagcagcaagagcaggagctgacagtagcccttgggcagcctgtgcggctgtgctgtgggcgggctgagcgtggtggccactggtacaaggagggcagtcgcctggcacctgctggccgtgtacggggctggaggggccgcctagagattgccagcttcctacctgaggatgctggccgctacctctgcctggcacgaggctccatgatcgtcctgcagaatctcaccttgattacaggtgactccttgacctccagcaacgatgatgaggaccccaagtcccatagggacctctcgaataggcacagttacccccagcaagcaccctactggacacacccccagcgcatggagaagaaactgcatgcagtacctgcggggaacaccgtcaagttccgctgtccagctgcaggcaaccccacgcccaccatccgctggcttaaggatggacaggcctttcatggggagaaccgcattggaggcattcggctgcgccatcagcactggagtctcgtgatggagagcgtggtgccctcggaccgcggcacatacacctgcctggtagagaacgctgtgggcagcatccgctataactacctgctagatgtgctggagcggtccccgcaccggcccatcctgcaggccgggctcccggccaacaccacagccgtggtgggcagcgacgtggagctgctgtgcaaggtgtacagcgatgcccagccccacatccagtggctgaagcacatcgtcatcaacggcagcagcttcggagccgacggtttcccctatgtgcaagtcctaaagactgcagacatcaatagctcagaggtggaggtcctgtacctgcggaacgtgtcagccgaggacgcaggcgagtacacctgcctcgcaggcaattccatcggcctctcctaccagtctgcctggctcacggtgctgccaggtactgggcgcatcccccacctcacatgtgacagcctgactccagcaggcagaaccaagtctcccactttgcagttctccctggagtcaggctcttccggcaagtcaagctcatccctggtacgaggcgtgcgtctctcctccagcggccccgccttgctcgccggcctcgtgagtctagatctacctctcgacccactatgggagttcccccgggacaggctggtgcttgggaagcccctaggcgagggctgctttggccaggtagtacgtgcagaggcctttggcatggaccctgcccggcctgaccaagccagcactgtggccgtcaagatgctcaaagacaacgcctctgacaaggacctggccgacctggtctcggagatggaggtgatgaagctgatcggccgacacaagaacatcatcaacctgcttggtgtctgcacccaggaagggcccctgtacgtgatcgtggagtgcgccgccaagggaaacctgcgggagttcctgcgggcccggcgccccccaggccccgacctcagccccgacggtcctcggagcagtgaggggccgctctccttcccagtcctggtctcctgcgcctaccaggtggcccgaggcatgcagtatctggagtcccggaagtgtatccaccgggacctggctgcccgcaatgtgctggtgactgaggacaatgtgatgaagattgctgactttgggctggcccgcggcgtccaccacattgactactataagaaaaccagcaacggccgcctgcctgtgaagtggatggcgcccgaggccttgtttgaccgggtgtacacacaccagagtgacgtgtggtcttttgggatcctgctatgggagatcttcaccctcgggggctccccgtatcctggcatcccggtggaggagctgttctcgctgctgcgggagggacatcggatggaccgacccccacactgccccccagagctgtacgggctgatgcgtgagtgctggcacgcagcgccctcccagaggcctaccttcaagcagctggtggaggcgctggacaaggtcctgctggccgtctctgaggagtacctcgacctccgcctgaccttcggaccctattccccctctggtggggacgccagcagcacctgctcctccagcgattctgtcttcagccacgaccccctgccattgggatccagctccttccccttcgggtctggggtgcagacatgagcaaggctcaaggctgtgcaggcacataggctggtggccttgggccttggggctcagccacagcctgacacagtgctcgaccttgatagcatggggcccctggcccagagttgctgtgccgtgtccaagggccgtgcccttgcccttggagctgccgtgcctgtgtcctgatggcccaaatgtcagggttctgctcggcttcttggaccatggcgcttagtccccatcccgggtttggctgagcctggctggagagctgctatgctaaacctcctgcctcccaataccagcaggaggttctgggcctctgaaccccctttccccacacctccccctgctgctgctgccccagcgtcttgacgggagcattggcccctgagcccagagaagctggaagcctgccgaaaacaggagcaaatggcgttttataaattatttttttgaaataaa

SEQ ID NO: 72 - DNA, 1356 bp, Homo sapiens
ttctcccgcaaccttcccttcgctccctcccgtcccccccagctcctagcctccgactccctccccccctcacgcccgccctctcgccttcgccgaaccaaagtggattaattacacgctttctgtttctctccgtgctgttctctcccgctgtgcgcctgcccgcctctcgctgtcctctctccccctcgccctctcttcggcccccccctttcacgttcactctgtctctcccactatctctgcccccctctatccttgatacaacagctgacctcatttcccgataccttttcccccccgaaaagtacaacatctggcccgccccagcccgaagacagcccgtcctccctggacaatcagacgaattctccccccccccccaaaaaaaaaagccatccccccgctctgccccgtcgcacattcggcccccgcgactcggccagagcggcgctggcagaggagtgtccggcaggagggccaacgcccgctgttcggtttgcgacacgcagcagggaggtgggcggcagcgtcgccggcttccagacaccaatgggaatcccaatggggaagtcgatgctggtgcttctcaccttcttggccttcgcctcgtgctgcattgctgcttaccgccccagtgagaccctgtgcggcggggagctggtggacaccctccagttcgtctgtggggaccgcggcttctacttcagcaggcccgcaagccgtgtgagccgtcgcagccgtggcatcgttgaggagtgctgtttccgcagctgtgacctggccctcctggagacgtactgtgctacccccgccaagtccgagagggacgtgtcgacccctccgaccgtgcttccggacaacttccccagataccccgtgggcaagttcttccaatatgacacctggaagcagtccacccagcgcctgcgcaggggcctgcctgccctcctgcgtgcccgccggggtcacgtgctcgccaaggagctcgaggcgttcagggaggccaaacgtcaccgtcccctgattgctctacccacccaagaccccgcccacgggggcgcccccccagagatggccagcaatcggaagtgagcaaaactgccgcaagtctgcagcccggcgccaccatcctgcagcctcctcctgaccacggacgtttccatcaggttccatcccgaaaatctctcggttccacgtccccctggggcttctcctgacccagtccccgtgccccgcctccccgaaacaggctactctcctcggccccctccatcgggctgaggaagcacagcagcatcttcaaacatgtacaaaatcgattggctttaaacacccttcacataccctcccccc

SEQ ID NO: 73 - DNA, 2281 bp, Homo sapiens
aaacaataagcatatctaagcaactacgatatctgtatggatcaggccaaagtcccgctaagattctccaatgttttcatggtctgagcccccctcctgttcccatctccactgcccctcggccctgtctgtgccctgcctctcagaggagggggctcagatggtgcggcctgagtgtgcggccggcggcatttgggatacacccgtagggtgggcggggtgtgtcccaggcctaattccatctttccaccatgacagagatgcccttgtgaggctggcctccttggcgcctgtccccacggcccccgcagcgtgagccacgatgctccccataccccacccattcccgatacaccttacttactgtgtgttggcccagccagagtgaggaaggagtttggccacattggagatggcggtagctgagcagacatgcccccacgagtagcctgactccctggtgtgctcctggaaggaagatcttggggacccccccaccggagcacacctagggatcatctttgcccgtctcctggggaccccccaagaaatgtggagtcctcgggggccgtgcactgatgcggggagtgtgggaagtctggcggttggaggggtgggtggggggcagtgggggctgggcggggggagtcctggggtaggaagtggtcccgggagattttggatggaaaagtcaggaggattgacagcagacttgcagaattacatagagaaattaggaacccccaaatttcatgtcaattgatctattccccctctttgtttcttggggcatttttccttttttttttttttgttttttttttacccctccttagctttatgcgctcagaaaccaaattaaaccccccccccatgtaacaggggggcagtgacaaaagcaagaacgcacgaagccagcctggagaccaccacgtcctgccccccgccatttatcgccctgattggattttgtttttcatctgtccctgttgcttgggttgagttgagggtggagcctcctggggggcactggccactgagcccccttggagaagtcagaggggagtggagaaggccactgtccggcctggcttctggggacagtggctggtccccagaagtcctgagggcggaggggggggttgggcagggtctcctcaggtgtcaggagggtgctcggaggccacaggagggggctcctggctggcctgaggctggccggaggggaaggggctagcaggtgtgtaaacagagggttccatcaggctggggcagggtggccgccttccgcacacttgaggaaccctcccctctccctcggtgacatcttgcccgcccctcagcaccctgccttgtctccaggaggtccgaagctctgtgggacctcttgggggcaaggtggggtgaggccggggagtagggaggtcaggcgggtctgagcccacagagcaggagagctgccaggtctgcccatcgaccaggttgcttgggccccggagcccacgggtctggtgatgccatagcagccaccaccgcggcgcctagggctgcggcagggactcggcctctgggaggtttacctcgcccccacttgtgcccccagctcagcccccctgcacgcagcccgactagcagtctagaggcctgaggcttctgggtcctggtgacggggctggcatgaccccgggggtcgtccatgccagtccgcctcagtcgcagagggtccctcggcaagcgccctgtgagtgggccattcggaacattggacagaagcccaaagagccaaattgtcacaattgtggaacccacattggcctgagatccaaaacgcttcgaggcaccccaaattacctgcccattcgtcaggacacccacccacccagtgttatattctgcctcgccggagtgggtgttcccgggggcacttgccgaccagccccttgcgtccccaggtttgcagctctcccctgggccactaaccatcctggcccgggctgcctgtctgacctccgtgcctagtcgtggctctccatcttgtctcctccccgtgtccccaatgtcttcagtggggggccccctcttgggtcccctcctctgccatcacctgaagacccccacgccaaacactgaatgtcacctgtgcctgccgcctcggtccaccttgcggcccgtgtttgactcaactcagctcctttaacgctaatatttccggcaaaatcccatgcttgggttttgtctttaaccttgtaacgcttgcaatcccaataaagcattaaaagtc

SEQ ID NO: 74 - DNA, 1124 bp, Homo sapiens
cgggaaacctgcactgacttttttctccttttggagggagagcagagaccatgtctgacatagaagaggtggtggaagagtacgaggaggaggagcaggaagaagcagctgttgaagagcaggaggaggcagcggaagaggatgctgaagcagaggctgagaccgaggagaccagggcagaagaagatgaagaagaagaggaagcaaaggaggctgaagatggcccaatggaggagtccaaaccaaagcccaggtcgttcatgcccaacttggtgcctcccaagatccccgatggagagagagtggactttgatgacatccaccggaagcgcatggagaaggacctgaatgagttgcaggcgctgattgaggctcactttgagaacaggaagaaagaggaggaggagctcgtttctctcaaagacaggatcgagagacgtcgggcagagcgggccgagcagcagcgcatccggaatgagcgggagaaggagcggcagaaccgcctggctgaagagagggctcgacgagaggaggaggagaacaggaggaaggctgaggatgaggcccggaagaagaaggctttgtccaacatgatgcattttgggggttacatccagaagcaggcccagacagagcggaaaagtgggaagaggcagactgagcgggaaaagaagaagaagattctggctgagaggaggaaggtgctggccattgaccacctgaatgaagatcagctgagggagaaggccaaggagctgtggcagagcatctataacttggaggcagagaagttcgacctgcaggagaagttcaagcagcagaaatatgagatcaatgttctccgaaacaggatcaacgataaccagaaagtctccaagacccgcgggaaggctaaagtcaccgggcgctggaaatagagcctggcctccttcaccaaagatctgctcctcgctcgcacctgcctccggcctgcactcccccagttcccgggccctcctgggcaccccaggcagctcctgtttggaaatggggagctggcctaggtgggagccaccactcctgcctgcccccacacccactccacaccagtaataaaaagccaccacacactgaaaaaaaaaaaa

SEQ ID NO: 75 - DNA, 855 bp, Homo sapiens
atctcatctcccagacgccacgtctctcggtttcttcttagatcactcctctgccaaagatcccaacaagacaacatggctcccaagaagcctgagcctaagaaggaggcagccaagccagctccagctccagctccagcccctgcaccagcccctgccccagctcctgaggctcccaaggaacctgcctttgaccccaagagtgtaaagatagacttcactgccgaccagattgaagagttcaaagaggccttttcattgtttgaccggaccccgactggagagatgaagatcacctacggccagtgcggggatgtactgcgggccctgggccagaaccctaccaatgccgaggtgctgcgtgtgctgggcaagcccaagcctgaagagatgaatgtcaagatgctggactttgagacgttcttgcccatcctgcagcacatttcccgcaacaaggagcagggcacctatgaggacttcgtggagggcctgcgtgtctttgacaaggagagcaatggcacggtcatgggtgctgagcttcggcacgtccttgccaccctgggagagaagatgactgaggctgaagtggagcagctgttagctgggcaagaggatgccaatggctgcatcaattatgaagcctttgtcaagcacatcatgtcagggtgaagcagagtcttccaggtgcctggcccttggctttagccataccagggtgagttaaagagaggccccggctgggtgagctgagatggagtcctcgacttatcaccacaccactgccccaaggaccttacaggccctccctgttaataaacagctctaacacggccaggctgggctctgggattctga

SEQ ID NO: 76 - DNA, 1404 bp, Homo sapiens
gccgggcagccatggctgagacactcttctggactcctctcctcgtggttctcctggcagggctgggggacaccgaggcccagcagaccacgctacacccacttgtgggccgtgtctttgtgcacaccttggaccatgagacgtttctgagccttcctgagcatgtcgctgtcccacccgctgtccacatcacctaccacgcccacctccagggacacccagacctgccccggtggctccgctacacccagcgcagcccccaccaccctggcttcctctacggctctgccaccccagaagatcgtgggctccaggtcattgaggtcacagcctacaatcgggacagctttgataccactcggcagaggctggtgctggagattggggacccagaaggccccctgctgccataccaagccgagttcctggtgcgcagccacgatgcggaggaggtgctgccctcaacacctgccagccgcttcctctcagccttggggggactctgggagcccggagagcttcagctgctcaacgtcacctctgccttggaccgtgggggccgtgtcccccttcccattgagggccgaaaagaaggggtatacattaaggtgggttctgcctcacctttttctacttgcctgaagatggtggcatcccccgatagccacgcccgctgtgcccagggccagcctccacttctgtcttgctacgacaccttggcaccccacttccgcgttgactggtgcaatgtgaccctggtggataagtcagtgccggagcctgcagatgaggtgcccaccccaggtgatgggatcctggagcatgacccgttcttctgcccacccactgaggccccagaccgtgacttcttggtggatgctctggtcaccctcctggtgcccctgctggtggccctgcttctcaccttgctgctggcctatgtcatgtgctgccggcgggagggaaggctgaagagagacctggctacctccgacatccagatggtccaccactgcaccatccacgggaacacagaggagctgcggcagatggcggccagccgcgaggtgccccggccactctccaccctgcccatgttcaatgtgcacacaggtgagcggctgcctccccgcgtggacagcgcccaggtgcccctcattctggaccagcactgacagcccagccagtggttccaggtccagccctgacttcatcctcccttctctgtccacaccacgagtggcacatcccacctgctgattccagctcctggccctcctggaacccaggctctaaacaagcagggagagggggtggggtggggtgagagtgtgtggagtaaggacattcagaataaatatctgctgctctgctcaccaattgctgctggcagcctctcccgtc

SEQ ID NO: 77 - DNA, 1610 bp, Homo sapiens
gcatcagaaaccagcacaccagagcaccagggcggggggcttctccgcagcaagtttccaaacaagccctcagtgaacatcattgaagcgtgactgcctgtctgcagggagaaggattccatttttcttctcagctggtccccaggcccacgggcacagggagagggacaactgcagcagtggggaggaggcacagctagctgcacagttctctcttctccttgtcctagtcagatgaaggaggctgcactacaaacccaaattctgcaaaaaaaataaaaataagccacaaaactaaaaggcctggccccattctggaaaaggcaaagctgcatgagacacagccttctgcctcctcgcctctcctggactggcttcctctttgagaaaatgcacaaagccctgggagatgacaagcacaaggactgactcaagctgtgtctttcagaccaaggaacatcagagaagctgtggggctgcctgccaggcaggatcatggctgccatcaagccttttctggatccagccatcaaggacatgtttgtggtgtgatgcacacttttgcaagcgtgtaagatgttacctggtttgtctcttttggaaaacaaaaatcagaaggctgcattctagagggcagagaaattcccccgaagactgagctggttgcctgcatcctctatcttctttgacccttatgactgaaagatcatcagtttggaaggtactggtccaatttatttaggaagtatctcttggagtttcagaaatgctagcttggacaactgaaaagtcacatcacagctggcattctgggggctaccaaaacaccccttctggagtagaagctgctggaaggcaggcctgagccattcaccacggacaggaagagcagctctggctatcaccactggcctctggggtcttcatatcttgccatctcatccagggttccatgaaagttacccagggtcctcatgtccttccttagagcctgagtggtgtgaggtgacaggtctctctctccactgcccctttctggtttaaaaaaatggtgcttgatgagggaaggtagactcttccctaggactgacgagttacggctgccagatgcctgcatgggaagaggtggacatctgcatcttccattggtggtcaaggatgggtgtgggagaaccacacctagtgcaagcctggtactcagtaaatatttgttgaaatgaatgataagagcattggtccccaagccagagagccagaagccatcacccaatgaccgccccttccttccggtctacaagagctctcaaggctgggtctgccaccactctgctttgcccaagtgtgacagcactggggaggagagacaggataaagggcagatgtcagcaatactaagggcttcctcatgggagggcatgaggctccactcattgtcttgtgacttccatccctgctgaatggggctgcaaggccaaggctccttaggggagaggtccttacctctgatccacttagagcaataaccactttttaaatgtaaaataaaaagacaaatgaaaaggcaaaaaaaaaaaaaaaaaaaaaaaaaaaaaaaaaaaaaaaaaaaaaaa

SEQ ID NO: 78 - DNA, 1356 bp, Homo sapiens; identical to SEQ ID NO: 72

SEQ ID NO: 79 - DNA, 2330 bp, Homo sapiens
gaattcggcacgagcgacgcggcccagaggccaggaacattccgcgcgtggaccagccgggccagggcgatgctgcgggtgcggtgtctgcgcggcgggagccgcggcgccgaggcggtgcactacatcggatctcggcttggacgaaccttgacaggatgggtgcagcgaactttccagagcacccaggcagctacggcttcctcccggaactcctgtgcagctgacgacaaagccactgagcctctgcccaaggactgccctgtctcttcttacaacgaatgggaccccttagaggaagtgatagtgggcagagcagaaaacgcctgtgttccaccgttcaccatcgaggtgaaggccaacacatatgaaaagtactggccattttaccagaagcaaggagggcattattttcccaaagatcatttgaaaaaggctgttgctgaaattgaagaaatgtgcaatattttaaaaacggaaggagtgacagtaaggaggcctgaccccattgactggtcattgaagtataaaactcctgattttgagtctacgggtttatacagtgcaatgcctcgagacatcctgatagttgtgggcaatgagattatcgaggctcccatggcatggcgttcacgcttctttgagtaccgagcgtacaggtcaattatcaaagactacttccaccgtggcgccaagtggacaacagctcctaagcccacaatggctgatgagctttataaccaggattatcccatccactctgtagaagacagacacaaattggctgctcagggaaaatttgtgacaactgagtttgagccatgctttgatgctgctgacttcattcgagctggaagagatatttttgcacagagaagccaggttacaaactacctaggcattgaatggatgcgtaggcatcttgctccagactacagagtgcatatcatctcctttaaagatcccaatcccatgcatattgatgctaccttcaacatcattggacctggtattgtgctttccaaccctgaccgaccatgtcaccagattgatcttttcaagaaagcaggatggactatcattactcctccaacaccaatcatcccagacgatcatccactctggatgtcatccaaatggctttccatgaatgtcttaatgctagatgaaaaacgtgttatggtggatgccaatgaagttccaattcaaaagatgtttgaaaagctgggtatcactaccattaaagttaacattcgtaatgccaattccctgggaggaggcttccattgctggacctgcgatgtccggcgccgaggcaccctacagtcctacttggactgaacaggcctgatggagcttgtggctggcctcagatacacctaagaagcttaggggcaaggttcattctcctgctttaaaaagtgcatgaactgtagtgctttaaacaatcatctccttaacaggggtcgtaagcctggtttgcttctattacttttctttgacataaagaaaataacttctgctaggtattactctctactcctaaagttatttactatttggcttcaagtataaaattttggtgaatgtgtaccaagaaaaaattagtcacctgagtaacttggccactaataattaaccatctacctctgtttttaattttctttccaaaaggcagcttgaaatgttggtcctaatcttaattttttttcctcttctatagacttgagaatgtttttctctaaatgagagaaagacttagaatgtacacagatccaaaatagaatcagattatctctttttttctaaaggagagaaagacttagaacatacacagatcctaagtagaaccaggtaattgtctctttttctaataaggaatttgggtaatttttaattttttgttttttaaaaaataacctagactatgcaaaacatcaaagtgaattttccatgaatgtttttaatattctcatctcaacattgtgatatatgctactaaaaaccttttcatatacatcttacctcatttcaagtgaattattttaatctttttctctctttccaaaaatttacaggaatgtttagtgtaattggatttcgctatcagttcccatccttaagttttgatattcaatatctgatagatacactgcatctttggtcatctaagatttgtttacaaatgtgcaaattatttagagcatagactttataagcattaaaaaaaactaatggaggtaaaacctaaatgcgatgtgaaataattttagtgttgatactgtatgtgtatttttattctaataaacttttgtgttccagattgaaaa

SEQ ID NO: 80 - DNA, 2436 bp, Homo sapiens
ggctcccacagtgggtggcggaaaacaactttcagagctttgtaaatgccagttgtgcccatcctcagctgctaaaaggaagaagcatttttgctgttagcccagatggctttgtgtgtgatgattttcccaaaccccagatcacggttcagccagaaacacagtcggcaataaaaggttccaatttgagtttcatctgctcagctgccagcagcagtgattccccaatgacttttgcttggaaaaaagacaatgaactactgcatgatgctgaaatggaaaattatgcacacctccgggcccaaggtggcgaggtgatggagtataccaccatccttcggctgcgcgaggtggaatttgccagtgaggggaaatatcagtgtgtcatctccaatcactttggttcatcctactctgtcaaagccaagcttacagtaaatatgcttccctcattcaccaagacccccatggatctcaccatccgagctggggccatggcacgcttggagtgtgctgctgtggggcacccagccccccagatagcctggcagaaggatgggggcacagacttcccagctgcacgggagagacgcatgcatgtgatgcccgaggatgacgtgttctttatcgtggatgtgaagatagaggacattggggtatacagctgcacagctcagaacagtgcaggaagtatttcagcaaatgcaactctgactgtcctagaaacaccatcatttttgcggccactgttggaccgaactgtaaccaagggagaaacagccgtcctacagtgcattgctggaggaagccctccccctaaactgaactggaccaaagatgatagcccattggtggtaaccgagaggcacttttttgcagcaggcaatcagcttctgattattgtggactcagatgtcagtgatgctgggaaatacacatgtgagatgtctaacacccttggcactgagagaggaaacgtgcgcctcagtgtgatccccactccaacctgcgactcccctcagatgacagccccatcgttagacgatgacggatgggccactgtgggtgtcgtgatcatagccgtggtttgctgtgtggtgggcacgtcactcgtgtgggtggtcatcatataccacacaaggcggaggaatgaagattgcagcattaccaacacagatgagaccaacttgccagcagatattcctagttatttgtcatctcagggaacgttagctgacaggcaggatgggtacgtgtcttcagaaagtggaagccaccaccagtttgtcacatcttcaggtgctggatttttcttaccacaacatgacagtagtgggacctgccatattgacaatagcagtgaagctgatgtggaagctgccacagatctgttcctttgtccgtttttgggatccacaggccctatgtatttgaagggaaatgtgtatggctcagatccttttgaaacatatcatacaggttgcagtcctgacccaagaacagttttaatggaccactatgagcccagttacataaagaaaaaggagtgctacccatgttctcatccttcagaagaatcctgcgaacggagcttcagtaatatatcgtggccttcacatgtgaggaagctacttaacactagttactctcacaatgaaggacctggaatgaaaaatctgtgtctaaacaagtcctctttagattttagtgcaaatccagagccagcgtcggttgcctcgagtaattctttcatgggtacctttggaaaagctctcaggagacctcacctagatgcctattcaagctttggacagccatcagattgtcagccaagagccttttatttgaaagctcattcttccccagacttggactctgggtcagaggaagatgggaaagaaaggacagattttcaggaagaaaatcacatttgtacctttaaacagactttagaaaactacaggactccaaattttcagtcttatgacttggacacatagactgaatgagaccaaaggaaaagcttaacatactacctcaagtgaacttttatttaaaagagagagaatcttatgttttttaaatggagttatgaattttaaaaggataaaaatgctttatttatacagatgaaccaaaattacaaaaagttatgaaaatttttatactgggaatgatgctcatataagaatacctttttaaactattttttaactttgttttatgcaaaaaagtatcttacgtaaattaatgatataaatcatgattattttatgtatttttataatgccagatttctttttatggaaaatgagttactaaagcattttaaataatacctgccttgtaccattttttaaatagaagttacttcattatattttgcacattatatttaataaaatgtgtcaatttgaaaaaaaaaaaaaaaaaaaa

SEQ ID NO: 81 - DNA, 2121 bp, Homo sapiens
ctgctcgcggccgccaccgccgggccccggccgtccctggctcccctcctgcctcgagaagggcagggcttctcagaggcttggcgggaaaaaagaacggagggagggatcgcgctgagtataaaagccggttttcggggctttatctaactcgctgtagtaattccagcgagaggcagagggagcgagcgggcggccggctagggtggaagagccgggcgagcagagctgcgctgcgggcgtcctgggaagggagatccggagcgaatagggggcttcgcctctggcccagccctcccgcttgatcccccaggccagcggtccgcaacccttgccgcatccacgaaactttgcccatagcagcgggcgggcactttgcactggaacttacaacacccgagcaaggacgcgactctcccgacgcggggaggctattctgcccatttggggacacttccccgccgctgccaggacccgcttctctgaaaggctctccttgcagctgcttagacgctggatttttttcgggtagtggaaaaccagcagcctcccgcgacgatgcccctcaacgttagcttcaccaacaggaactatgacctcgactacgactcggtgcagccgtatttctactgcgacgaggaggagaacttctaccagcagcagcagcagagcgagctgcagcccccggcgcccagcgaggatatctggaagaaattcgagctgctgcccaccccgcccctgtcccctagccgccgctccgggctctgctcgccctcctacgttgcggtcacacccttctcccttcggggagacaacgacggcggtggcgggagcttctccacggccgaccagctggagatggtgaccgagctgctgggaggagacatggtgaaccagagtttcatctgcgacccggacgacgagaccttcatcaaaaacatcatcatccaggactgtatgtggagcggcttctcggccgccgccaagctcgtctcagagaagctggcctcctaccaggctgcgcgcaaagacagcggcagcccgaaccccgcccgcggccacagcgtctgctccacctccagcttgtacctgcaggatctgagcgccgccgcctcagagtgcatcgacccctcggtggtcttcccctaccctctcaacgacagcagctcgcccaagtcctgcgcctcgcaagactccagcgccttctctccgtcctcggattctctgctctcctcgacggagtcctccccgcagggcagccccgagcccctggtgctccatgaggagacaccgcccaccaccagcagcgactctgaggaggaacaagaagatgaggaagaaatcgatgttgtttctgtggaaaagaggcaggctcctggcaaaaggtcagagtctggatcaccttctgctggaggccacagcaaacctcctcacagcccactggtcctcaagaggtgccacgtctccacacatcagcacaactacgcagcgcctccctccactcggaaggactatcctgctgccaagagggtcaagttggacagtgtcagagtcctgagacagatcagcaacaaccgaaaatgcaccagccccaggtcctcggacaccgaggagaatgtcaagaggcgaacacacaacgtcttggagcgccagaggaggaacgagctaaaacggagcttttttgccctgcgtgaccagatcccggagttggaaaacaatgaaaaggcccccaaggtagttatccttaaaaaagccacagcatacatcctgtccgtccaagcagaggagcaaaagctcatttctgaagaggacttgttgcggaaacgacgagaacagttgaaacacaaacttgaacagctacggaactcttgtgcgtaaggaaaagtaaggaaaacgattccttctaacagaaatgtcctgagcaatcacctatgaacttgtttcaaatgcatgatcaaatgcaacctcacaaccttggctgagtcttgagactgaaagatttagccataatgtaaactgcctcaaattggactttgggcataaaagaacttttttatgcttaccatcttttttttttctttaacagatttgtatttaagaattgtttttaaaaaattttaa

SEQ ID NO: 82 - DNA, 2121 bp, Homo sapiens; identical to SEQ ID NO: 81

SEQ ID NO: 83 - DNA, 3597 bp, Homo sapiens
ggcgaatggagcaggggcgcgcagataattaaagatttacacacagctggaagaaatcatagagaagccgggcgtggtggctcatgcctataatcccagcacttttggaggctgaggcgggcagatcacttgagatcaggagttcgagaccagcctggtgccttggcatctcccaatggggtggctttgctctgggctcctgttccctgtgagctgcctggtcctgctgcaggtggcaagctctgggaacatgaaggtcttgcaggagcccacctgcgtctccgactacatgagcatctctacttgcgagtggaagatgaatggtcccaccaattgcagcaccgagctccgcctgttgtaccagctggtttttctgctctccgaagcccacacgtgtatccctgagaacaacggaggcgcggggtgcgtgtgccacctgctcatggatgacgtggtcagtgcggataactatacactggacctgtgggctgggcagcagctgctgtggaagggctccttcaagcccagcgagcatgtgaaacccagggccccaggaaacctgacagttcacaccaatgtctccgacactctgctgctgacctggagcaacccgtatccccctgacaattacctgtataatcatctcacctatgcagtcaacatttggagtgaaaacgacccggcagatttcagaatctataacgtgacctacctagaaccctccctccgcatcgcagccagcaccctgaagtctgggatttcctacagggcacgggtgagggcctgggctcagtgctataacaccacctggagtgagtggagccccagcaccaagtggcacaactcctacagggagcccttcgagcagcacctcctgctgggcgtcagcgtttcctgcattgtcatcctggccgtctgcctgttgtgctatgtcagcatcaccaagattaagaaagaatggtgggatcagattcccaacccagcccgcagccgcctcgtggctataataatccaggatgctcaggggtcacagtgggagaagcggtcccgaggccaggaaccagccaagtgcccacactggaagaattgtcttaccaagctcttgccctgttttctggagcacaacatgaaaagggatgaagatcctcacaaggctgccaaagagatgcctttccagggctctggaaaatcagcatggtgcccagtggagatcagcaagacagtcctctggccagagagcatcagcgtggtgcgatgtgtggagttgtttgaggccccggtggagtgtgaggaggaggaggaggtagaggaagaaaaagggagcttctgtgcatcgcctgagagcagcagggatgacttccaggagggaagggagggcattgtggcccggctaacagagagcctgttcctggacctgctcggagaggagaatgggggcttttgccagcaggacatgggggagtcatgccttcttccaccttcgggaagtacgagtgctcacatgccctgggatgagttcccaagtgcagggcccaaggaggcacctccctggggcaaggagcagcctctccacctggagccaagtcctcctgccagcccgacccagagtccagacaacctgacttgcacagagacgcccctcgtcatcgcaggcaaccctgcttaccgcagcttcagcaactccctgagccagtcaccgtgtcccagagagctgggtccagacccactgctggccagacacctggaggaagtagaacccgagatgccctgtgtcccccagctctctgagccaaccactgtgccccaacctgagccagaaacctgggagcagatcctccgccgaaatgtcctccagcatggggcagctgcagcccccgtctcggcccccaccagtggctatcaggagtttgtacatgcggtggagcagggtggcacccaggccagtgcggtggtgggcttgggtcccccaggagaggctggttacaaggccttctcaagcctgcttgccagcagtgctgtgtccccagagaaatgtgggtttggggctagcagtggggaagaggggtataagcctttccaagacctcattcctggctgccctggggaccctgccccagtccctgtccccttgttcacctttggactggacagggagccacctcgcagtccgcagagctcacatctcccaagcagctccccagagcacctgggtctggagccgggggaaaaggtagaggacatgccaaagcccccacttccccaggagcaggccacagacccccttgtggacagcctgggcagtggcattgtctactcagcccttacctgccacctgtgcggccacctgaaacagtgtcatggccaggaggatggtggccagacccctgtcatggccagtccttgctgtggctgctgctgtggagacaggtcctcgccccctacaacccccctgagggccccagacccctctccaggtggggttccactggaggccagtctgtgtccggcctccctggcaccctcgggcatctcagagaagagtaaatcctcatcatccttccatcctgcccctggcaatgctcagagctcaagccagacccccaaaatcgtgaactttgtctccgtgggacccacatacatgagggtctcttaggtgcatgtcctcttgttgctgagtctgcagatgaggactagggcttatccatgcctgggaaatgccacctcctggaaggcagccaggctggcagatttccaaaagacttgaagaaccatggtatgaaggtgattggccccactgacgttggcctaacactgggctgcagagactggaccccgcccagcattgggctgggctcgccacatcccatgagagtagagggcactgggtcgccgtgccccacggcaggcccctgcaggaaaactgaggcccttgggcacctcgacttgtgaacgagttgttggctgctccctccacagcttctgcagcagactgtccctgttgtaactgcccaaggcatgttttgcccaccagatcatggcccacgtggaggcccacctgcctctgtctcactgaactagaagccgagcctagaaactaacacagccatcaagggaatgacttgggcggccttgggaaatcgatgagaaattgaacttcagggagggtggtcattgcctagaggtgctcattcatttaacagagcttccttaggttgatgctggaggcagaatcccggctgtcaaggggtgttcagttaaggggagcaacagaggacatgaaaaattgctatgactaaagcagggacaatttgctgccaaacacccatgcccagctgtatggctgggggctcctcgtatgcatggaacccccagaataaatatgctcagccaccctgtgggccgggcaatccagacagcaggcataaggcaccagttaccctgcatgttggcccagacctcaggtgctagggaaggcgggaaccttgggttgagtaatgctcgtctgtgtgttttagtttcatcacctgttatctgtgtttgctgaggagagtggaacagaaggggtggagttttgtataaataaagtttctttgtctc

SEQ ID NO: 84 - DNA, 2709 bp, Homo sapiens
gggaatagcagaataggagcaagccagcactagtcagctaactaagtgactcaaccaaggccttttttccttgttatctttgcagatacttcattttcttagcgtttctggagattacaacatcctgcggttccgtttctgggaactttactgatttatctcccccctcacacaaataagcattgattcctgcatttctgaagatctcaagatctggactactgttgaaaaaatttccagtgaggctcacttatgtctgtaaagatgggaaaaaaatacaagaacattgttctactaaaaggattagaggtcatcaatgattatcattttagaatggttaagtccttactgagcaacgatttaaaacttaatttaaaaatgagagaagagtatgacaaaattcagattgctgacttgatggaagaaaagttccgaggtgatgctggtttgggcaaactaataaaaattttcgaagatataccaacgcttgaagacctggctgaaactcttaaaaaagaaaagttaaaagtaaaaggaccagccctatcaagaaagaggaagaaggaagtgcatgctacttcacctgcaccctccacaagcagcactgtcaaaactgaaggagcagaggcaactcctggagctcagaaaagaaaaaaatcaaccaaagaaaaggctggacccaaagggagtaaggtgtccgaggaacagactcagcctccctctcctgcaggagccggcatgtccacagccatgggccgttccccatctcccaagacctcattgtcagctccacccaacagttcttcaactgagaacccgaaaacagtggccaaatgtcaggtaactcccagaagaaatgttctccaaaaacgcccagtgatagtgaaggtactgagtacaacaaagccatttgaatatgagaccccagaaatggagaaaaaaataatgtttcatgctacagtggctacacagacacagttcttccatgtgaaggttttaaacaccagcttgaaggagaaattcaatggaaagaaaatcatcatcatatcagattatttggaatatgatagtctcctagaggtcaatgaagaatctactgtatctgaagctggtcctaaccaaacgtttgaggttccaaataaaatcatcaacagagcaaaggaaactctgaagattgatattcttcacaaacaagcttcaggaaatattgtatatggggtatttatgctacataagaaaacagtaaatcagaagaccacaatctacgaaattcaggatgatagaggaaaaatggatgtagtggggacaggacaatgtcacaatatcccctgtgaagaaggagataagctccagcttttctgctttcgacttagaaaaaagaaccagatgtcaaaactgatttcagaaatgcatagttttatccagataaagaaaaaaacaaacccgagaaacaatgaccccaagagcatgaagctaccccaggaacagcgtcagcttccatatccttcagaggccagcacaaccttccctgagagccatcttcggactcctcagatgccaccaacaactccatccagcagtttcttcaccaagaaaagtgaagacacaatctccaaaatgaatgacttcatgaggatgcagatactgaaggaagggagtcattttccaggaccgttcatgaccagcataggcccagctgagagccatccccacactcctcagatgcctccatcaacaccaagcagcagtttcttaaccacgttgaaaccaagactgaagactgaacctgaagaagtttccatagaagacagtgcccagagtgacctcaaagaagtgatggtgctgaacgcaacagaatcatttgtatatgagcccaaagagcagaagaaaatgtttcatgccacagtggcaactgagaatgaagtcttccgagtgaaggtttttaatattgacctaaaggagaagttcaccccaaagaagatcattgccatagcaaattatgtttgccgcaatgggttcctggaggtatatcctttcacacttgtggctgatgtgaatgctgaccgaaacatggagatcccaaaaggattgattagaagtgccagcgtaactcctaaaatcaatcagctttgctcacaaactaaaggaagttttgtgaatggggtgtttgaggtacataagaaaaatgtaaggggtgaattcacttattatgaaatacaagataatacagggaagatggaagtggtggtgcatggacgactgaacacaatcaactgtgaggaaggagataaactgaaactcaccagctttgaattggcaccgaaaagtgggaataccggggagttgagatctgtaattcatagtcacatcaaggtcatcaagaccaggaaaaacaagaaagacatactcaatcctgattcaagtatggaaacttcaccagactttttcttctaaaatctggatgtcattgacgataatgtttatggagataaggtctaagtccctaaaaaaatgtacatatacctggttgaaatacaacactatacatacacaccaccatatatactagctgttaatcctatggaatgggggtattgggagtgcttttttaatttttcatagtttttttttaataaaatggcatattttgcatctacaacttctataataagaaaaaataaataaacattatcttttttgtgaaaaaaa

SEQ ID NO: 85 - DNA, 777 bp, Homo sapiens
ttcttcaaaccctcctcttccctgtgttctcctacagagattgctgatttctccttaagcaagagattcactgccgctaagcatggctcagaccaactcgttcttcatgctgatctcctccctgatgttcctgtctctgagccaaggccaagaggcccagacagagttgccccaggcccggatcagctgcccagaaggcaccaatgcctatcgctcctactgctactactttaatgaagaccgtgagacctgggttgatgcagatctctattgccagaacatgaattcgggcaacctggtgtctgtgctcacccaggccgagggtgcctttgtggcctcactgattaaggagagtggcactgatgacttcaatgtctggattggcctccatgaccccaaaaagaaccgccgctggcactggagcagtgggtccctggtctcctacaagtcctggggcattggagccccaagcagtgttaatcctggctactgtgtgagcctgacctcaagcacaggattccagaaatggaaggatgtgccttgtgaagacaagttctcctttgtatgcaagttcaaaaactagaggcagctggaaaatacatgtctagaactgatccagcaattacaacggagtcaaaaattaaaccggaccatctctccaactcaactcaacctggacactctcttctctgctgagtttgccttgttaatcttcaatagttttacctaccccagtctttggaaccctaaataataaaaataaacatgttttccact

SEQ ID NO: 86 - DNA, 2043 bp, Homo sapiens
gtgcttaggcactgcagttgagtggctcacaaggagctaaaatttcactaatgcgtattcagtgggtggttctggtttgcctgatttttgcctctgggcatggctgtttcagcctgagaggctgttccaagaatgttgctttactaggagctcatgccgcctggtggtaaatatgaagtacagcagtgcaacagaccagttttactccaaggaaaccctgtagagatgacagcaatggttggtgatttctgcctcaattatgaaagtgatctggtgttacagggccagagaagactaggggagttcgggttttctagaccaaacagacactcagtcctgggcctggaggtctctgcagtgaggtgctgccacagacagagccaccttaactcctcaggacaaccagtggcttccgacacacactatgcactggagggcaagcagctctcagcttgggagcaactgaggatggtgaacagcctgggcaaggagtgctctgaggctaagaccctgaacagcaggaaccgaagtgcagctccccacttcaggtaatgtgattctaccctttgcctgagaaacatatccatcctaattgccatgtgctcagctggaccactagagggagccatcctgtaacgggtgaggtcaacctaacaaatggtatcagtcgagtattgatcggaggccaacgcaagaagttaccagtagcctatttcagatttattaaaaaacacataggtaacgagtcagagctttggctaggaatgatttggaaaagaactgaaggcataattccacaggacattcacagttgtgtgctagagacagagaggagcaggaaagtgttttagaagcatttgcggtggacaatggaaggcccggcttcatcgtattcctgtttgctgatccacatctgctggaaggtggacagagaggccaggatggagccaccgatccagacagagtatttgcgctccggaggggcaatgatctgtcagtcaagatgaaaaagaatggtcattaatgtcatcattagtgcagtcgttagtgcggtaggacagagcctggatgttctaccatggcctagtttcttgttcagcagggacacaggcttgtctgttagatgccaattgtgtcctaattgtgtcatgttcttggcaggaccgccagagggagccatggatttagaaattcttcagtggtttcatggatgccagcagactccatccctggaaaagagacacaggccatggtccttaagtggagagtaaaacccaggctagacatggaagaccagacttgaacatctggatgatcttgcagtggactgaggctgggaagacataataatctaggaaccacctgtctgagagacaaaagggtcttgttatgctctatgtcttcctgcctgccttctaatgaggaaggcctgctgcagcatcctgaggtgtgggctacaacagaaatgcttttggtcttggggcaaccgtcacttgtctccatgttctggaggctggcttgatatggaagaagacaatgactccccttcccaggaaaagggcgtttgttgcctaccgatgaaggatggctggaacagggtctctgggcagcggaaacgttcatttccgatggtgatcacttgcccatcaggcaactcgtaactcttctcaagggaggatgaggatgcggcagtggccatctcattttcaaagtccagagctacataacacagtttctccttgatgtcccggacaatctcacgctcagctgtcaaccagatacaaacattgtggcaaacattagggtctgcacaggtggcaaagattcacctgccctactgcagtctctccctcaagacatgtgccatcaaaaaatgtgtcagttcaatattctgcaatccaaaatccacaatgataatgacgtagtagggccaccagggaaccacctctgttcctaggacagtgtctcatgcatagtaggccctcagcatgcattgtctgggaaatgcataacaagaataaaatgagctagctagagaaaggc

SEQ ID NO: 87 - DNA, 1501 bp, Homo sapiens
agcgagtccttcttttcctgactgcagctcttttcattttgccatccttctccagctccatgatggttctgcaggtttctgcggccccccggacagtggctctgacggcgttactgatggtgctgctcacatctgtggtccagggcagggccactccagagaattacgtgtaccagggacggcaggaatgctacgcgtttaatgggacacagcgcttcctggagagatacatctacaaccgggaggagtacgcgcgcttcgacagcgacgtgggggagttccgggcggtgacggagctggggcggcctgctgcggagtactggaacagccagaaggacatcctggaggagaagcgggcagtgccggacagggtatgcagacacaactacgagctggacgaggccgtgaccctgcagcgccgagtccagcctaaggtgaacgtttccccctccaagaaggggcccctgcagcaccacaacctgcttgtctgccacgtgacagatttctacccaggcagcattcaagtccgatggttcctgaatggacaggaggaaacagctggggtcgtgtccaccaacctgatccgtaatggagactggaccttccagatcctggtgatgctggaaatgaccccccagcagggagacgtctacatctgccaagtggagcacaccagcctggacagtcctgtcaccgtggagtggaaggcacagtctgattctgcccagagtaagacattgacgggagctgggggcttcgtgctggggctcatcatctgtggagtgggcatcttcatgcacaggaggagcaagaaagttcaacgaggatctgcataaacagggttcctgacctcaccgaaaagactaatgtgccttagaacaagcatttgctgtgttttgttaacacctggttccaggacagaccctcagcttcccaagaggatactgctgccaagaagttgctctgaagtcagtttctatcgttctgctctttgattcaaagcactgtttctctcactgggcctccaaccatgttcccttcttcttagcaccacaaataatcaaaacccaacataagtgtttgctttcctttaaaaatatgcatcaaatcgtctctcattacttttctctgagggttttagtaaacagtaggagttaataaagaagttcattttggtttacacgtaggaaagaagagaagcatcaaagtggagatatgttaactattgtataatgtggcctgttatacatgacactcttctgaattgactgtatttcagtgagctgcccccaaatcaagtttagtgccctcatccatttatgtctcagaccgctattcttaactattcaatggtgagcagactgcaaatctgcctgataggacccatattcccacagcactaattcaacatatatcttactgagagcatgttttatcattaccattaagaagttaaatgaacatcagaatttaaaatcataaatataatctaatacacttt

SEQ ID NO: 88 - DNA, 1096 bp, Homo sapiens
atgatcctaaacaaagctctgctgctgggggccctcgctctgaccaccgtgatgagcccctgtggaggtgaagacattgtggctgaccacgttgcctcttgtggtgtaaacttgtaccagttttacggtccctctggccagtacacccatgaatttgatggagatgagcagttctacgtggacctggagaggaaggagactgcctggcggtggcctgagttcagcaaatttggaggttttgacccgcagggtgcactgagaaacatggctgtggcaaaacacaacttgaacatcatgattaaacgctacaactctaccgctgctaccaatgaggttcctgaggtcacagtgttttccaagtctcccgtgacactgggtcagcccaacaccctcatttgtcttgtggacaacatctttcctcctgtggtcaacatcacatggctgagcaatgggcagtcagtcacagaaggtgtttctgagaccagcttcctctccaagagtgatcattccttcttcaagatcagttacctcaccttcctcccttctgctgatgagatttatgactgcaaggtggagcactggggcctggaccagcctcttctgaaacactgggagcctgagattccagcccctatgtcagagctcacagagactgtggtctgtgccctggggttgtctgtgggcctcatgggcattgtggtgggcactgtcttcatcatccaaggcctgcgttcagttggtgcttccagacaccaagggccattgtgaatcccatcctggaagggaaggtgcatcgccatctacaggagcagaagaatggacttgctaaatgacctagcactattctctggcccgatttatcatatcccttttctcctccaaatatttctcctctcaccttttctctgggacttaagctgctatatcccctcagagctcacaaatgcctttacattctttccctgacctcctgattttttttttcttttctcaaatgttacctacaatacatgcctggggtaagccacccggctacctaattcctcagtaacctccatctaaaatctccaaggaagcaataaattccttttatgag

SEQ ID NO: 89 - DNA, 1100 bp, Homo sapiens
ctaaagctgggttggtagctcctacctactgtgtggcaagaaggtatgggtcatgaacagaaccaaggagctgcgctgctacagatgttaccacttctgtggctgctaccccactcctgggccgtccctgaagctcctactccaatgtggccagatgacctgcaaaaccacacattcctgcacacagtgtactgccaggatgggagtcccagtgtgggactctctgaggcctacgacgaggaccagcttttcttcttcgacttttcccagaacactcgggtgcctcgcctgcccgaatttgctgactgggctcaggaacagggagatgctcctgccattttatttgacaaagagttctgcgagtggatgatccagcaaatagggccaaaacttgatgggaaaatcccggtgtccagagggtttcctatcgctgaagtgttcacgctgaagcccctggagtttggcaagcccaacactttggtctgttttgtcagtaatctcttcccacccatgctgacagtgaactggcagcatcattccgtccctgtggaaggatttgggcctacttttgtctcagctgtcgatggactcagcttccaggccttttcttacttaaacttcacaccagaaccttctgacattttctcctgcattgtgactcacgaaattgaccgctacacagcaattgcctattgggtaccccggaacgcactgccctcagatctgctggagaatgtgctgtgtggcgtggcctttggcctgggtgtgctgggcatcatcgtgggcattgttctcatcatctacttccggaagccttgctcaggtgactgattcttccagaccagagtttgatgccagcagcttcggccatccaaacagaggatgctcagatttctcacatcctgcccaggatctcctcttagggtagaagaagtctctgggacatccctggggtgtgtgtgtagatttcccacctggggactctgctgtccctgggcttgcatcccagggatcccagagtggcctgcctatcacaaccacatcccttccccccacaaggcaataaatctcatttctttaaaaaaaaaaaaaaaaaaaaa

SEQ ID NO: 90 - DNA, 3526 bp, Homo sapiens
ccacgcgtccggacaggcttaagcatggccaagaagcttgagagaagaaaaatttcagaaaaattgtctcaatttgactagaatatcaatgaaccaggaaaactgaagcaccttccctaaagaaaacttgggtatacaattactccacagacagagctgagggttttttacccaaatcagtcactggattttgctgcctgatacgtgaatcttcttggaatttttctcatgtggatctaaggggaatgctttattatggctgctgttgtccaacagaacgacctagtatttgaatttgctagtaacgtcatggaggatgaacgacagcttggtgatccagctatttttcctgccgtaattgtggaacatgttcctggtgctgatattctcaatagttatgccggtctagcctgtgtggaagagcccaatgacatgattactgagagttcactggatgttgctgaagaagaaatcatagacgatgatgatgatgacatcacccttacagttgaagcttcttgtcatgacggggatgaaacaattgaaactattgaggctgctgaggcactcctcaatatggattcccctggccctatgctggatgaaaaacgaataaataataatatatttagttcacctgaagatgacatggttgttgccccagtcacccatgtgtccgtcacattagatgggattcctgaagtgatggaaacacagcaggtgcaagaaaaatatgcagactcaccgggagcctcatcaccagaacagcctaagaggaaaaaaggaagaaaaactaaaccaccacgaccagattccccagccactacgccaaatatatctgtgaagaagaaaaacaaagatggaaagggaaacacaatttatctttgggagtttttactggcactgctccaggacaaggctacttgtcctaaatacatcaagtggacccagcgagagaaaggcatttttaaattggtggattctaaagcagtgtccaggttgtgggggaagcacaaaaacaaacctgatatgaattatgagaccatgggaagagcactcaggtactattaccaaaggggtattctggcaaaagtggaaggtcagcgcttggtgtatcagtttaaagaaatgccaaaagatcttatatatataaatgatgaggatccaagttccagcatagagtcttcagatccatcactatcttcatcagccacttcaaataggaatcaaaccagccggtcgagagtatcttcaagtccaggggtaaaaggaggagccactacagttctaaaaccagggaattctaaagctgcaaaacccaaagatcctgtggaagttgcacaaccatcagaagttttgaggacagtgcagcccacgcagtctccatatcctacccagctcttccggactgttcatgtagtacagccagtacaggctgtcccagagggagaagcagctagaaccagtaccatgcaggatgaaacattaaattcttccgttcagagtattaggactatacaggctccaacccaagttccagtggttgtgtctcctaggaatcagcagttgcatacagtaacactccaaacagtgccactcacaacagttatagccagcacagatccatcagcaggtactggatctcagaagtttattttacaagccattccatcatcacagcccatgacagtactgaaagaaaatgtcatgctgcagtcacaaaaggcgggctctcctccttcaattgtcttgggccctgcccaggttcagcaggtccttactagcaatgttcagaccatttgcaatggaaccgtcagtgtggcttcctctccatccttcagtgctactgcacctgtggtgaccttttctcctcgcagttcacagctggttgctcacccacctggcactgtaatcacttcagttatcaaaactcaagaaacaaaaactcttacacaggaagtagagaaaaaggaatctgaagatcatttgaaagagaacactgagaaaacggagcagcagccacagccttatgtgatggtagtgtccagttccaatggatttacttctcaggtagctatgaaacaaaacgaactgctggaacccaactctttttagttaatataccaaagcttatgaataattgtttgttaattgaacattttcaattatatgcagactgactgattctaagataaattctaaggaggtttctaattttgtaattgttaaaaatagagttaattttgactttgttagatgagggaggaaaactcaactgtttctctttgttatctaaatgtttcagaattcaatcgtgaaggaacaggcattttacactatgaagacattcttttgagatttttatttcagttgctatatcataagcatttttaaagtttcttttctaattttacattgtattagattttctgattcttttgtaaatacagaacttaaatagaaggcaacaggaaatttatataggaactattttcattccacttgtgtaagttaagtcttgactctttcaaatgcaaaaaacctattttatgctttgttaaaattatggtgtcacttagattgactttagttgactgcactatataatatagaactatgaatatgtagaataacatgaaaaattggaggtgctggtggtatggctgaccctgtttcagaagcaggatagtataaaagcatcagcctaagaatggcactcccactaactagctatgtaatcttgacctctttgggctttagttcctctcataaaaggaagagatgtattggattagactagattatcaccactttctcttctagttctaatttttttaattctaatacctatattttcaagttatgtcaattaaatcattatcaggttatttcctaatgtaagaatagctaaaatgttgcagagaaataagtgacccaacaaaatttattcatctgttatgggtaagatctgccataaattcttcctaaataatttgtttactaactctttaggccactgtgctttgcggtccattagtaaacttgtgttgctaagtgctaaacagaatactgctattttgagagagtcaagactctttcttaagggccaagaaagcaacttgagccttgggctaatctggctgagtagtcagttataaaagcataattgctttatattttggatcattttttactgggggcggacttggggggggttgcatacaaagataacatatatatccaactttctgaaatgaaatgtttttagattactttttcaactgtaaataatgtacatttaatgtcacaagaaaaaaatgtcttctgcaaattttctagtataacagaaatttttgtagatgaaaaaaatcattatgtttagaggtctaatgctatgttttcatattacagagtgaatttgtatttaaacaaaaatttaaattttggaatcctctaaacatttttgtatctttaattggtttattattaaataaatcatataaaaattctcaaaaaaaaaaaaaaa

SEQ ID NO: 91 - DNA, 1968 bp, Homo sapiens
aattccgccgggcgcttagaacagaggcttgcacaggtggagatgtggaagtctgtagtgggccatgatgtgtctgtttccgtggagacccagggtgatgattgggacacagatcctgactttgtgaatgacatctctgaaaaggagcaacgatggggagccaagaccatcgaggggtctggacgcacagaacacatcaacatccaccagctgaggaacaaagtatcagaggagcatgatgttctcaggaagaaagagatggagtcagggcccaaagcatcccatggctatggaggtcggtttggagtagaaagagaccgaatggacaagagtgcagtgggccatgagtatgttgccgaggtggagaagcactcttctcagacggatgctgccaaaggctttgggggcaagtacggagttgagagggacagggcagacaagtcagcagtcggctttgattataaaggagaagtggagaagcatacatctcagaaagattactctcgtggctttggtggccggtacggggtggagaaggataaatgggacaaagcagctctgggatatgactacaagggagagacggagaaacacgagtcccagagagattatgccaagggctttggtggccagtatggaatccagaaggaccgagtggataagagcgctgtcggcttcaatgaaatggaggccccgaccacagcttataagaagacgacgcccatagaagccgcttctagtggtgcccgtgggctgaaggcgaaatttgagtccatggctgaggagaagaggaagcgagaggaagaggagaaggcacagcaggtggccaggaggcaacaggagcgaaaggctgtgacaaagaggagccctgaggctccacagccagtgatagctatggaagagccagcagtaccggccccactgcccaagaaaatctcctcagaggcctggcctccagttgggactcctccatcatcagagtctgagcctgtgagaaccagcagggaacacccagtgcccttgctgcccattaggcagactctcccggaggacaatgaggagcccccagctctgccccctaggactctggaaggcctccaggtggaggaagagccagtgtacgaagcagagcctgagcctgagcccgagcctgagcccgagcctgagaatgactatgaggacgttgaggagatggacaggcatgagcaggaggatgaaccagagggggactatgaggaggtgctcgagcctgaagattcttctttttcttctgctctggctggatcatcaggctgcccggctggggctggggctggggctgtggctctggggatctcagctgtggctctatatgattaccaaggagagggaagtgatgagctttcctttgatccggacgacgtaatcactgacattgagatggtggacgagggctggtggcggggacgttgccatggccactttggactcttccctgcaaattatgtcaagcttctggagtgactagagctcactgtctactgcaactgtgatttcccatgtccaaagtggctctgctccaccccctccctattcctgatgcaaatgtctaaccagatgagtttctggacagacttccctctcctgcttcattaagggcttggggcagagacagcatggggaaggaggtccccttccccaagagtcctctctatcctggatgagctcatgaacatttctcttgtgttcctgactccttcccaatgaacacctctctgccaccccaagctctgctctcctcctctgtgagctctgggcttcccagtttgtttacccgggaaagtacgtctagattgtgtggtttgcctcattgtgctatttgcccactttccttccctgaagaaatatctgtgaaccttctttctgttcagtcctaaaattcgaaataaagtgagactatggttcacctgtaaaaaaaaaaaaggaatt

SEQ ID NO: 92 - DNA, 2088 bp, Homo sapiens
gaattcggcacgagcgcgcggcgaatctcaacgctgcgccgtctgcgggcgcttccgggccaccagtttctctgctttccaccctggcgccccccagccctggctccccagctgcgctgccccgggcgtccacgccctgcgggcttagcgggttcagtgggctcaatctgcgcagcgccacctccatgttgaccaagcctctacaggggcctcccgcgccccccgggacccccacgccgccgccaggaggcaaggatcgggaagcgttcgaggccgagtatcgactcggccccctcctgggtaaggggggctttggcaccgtcttcgcaggacaccgcctcacagatcgactccaggtggccatcaaagtgattccccggaatcgtgtgctgggctggtcccccttgtcagactcagtcacatgcccactcgaagtcgcactgctatggaaagtgggtgcaggtggtgggcaccctggcgtgatccgcctgcttgactggtttgagacacaggaaggcttcatgctggtcctcgagcggcctttgcccgcccaggatctctttgactatatcacagagaagggcccactgggtgaaggcccaagccgctgcttctttggccaagtagtggcagccatccagcactgccattcccgtggagttgtccatcgtgacatcaaggatgagaacatcctgatagacctacgccgtggctgtgccaaactcattgattttggttctggtgccctgcttcatgatgaaccctacactgactttgatgggacaagggtgtacagccccccagagtggatctctcgacaccagtaccatgcactcccggccactgtctggtcactgggcatcctcctctatgacatggtgtgtggggacattccctttgagagggaccaggagattctggaagctgagctccacttcccagcccatgtctccccagactgctgtgccctaatccgccggtgcctggcccccaaaccttcttcccgaccctcactggaagagatcctgctggacccctggatgcaaacaccagccgaggatgttacccctcaacccctccaaaggaggccctgcccctttggcctggtccttgctaccctaagcctggcctggcctggcctggcccccaatggtcagaagagccatcccatggccatgtcacagggatagatggacatttgttgacttggttttacaggtcattaccagtcattaaagtccagtattactaaggtaagggattgaggatcaggggttagaagacataaaccaagtttgcccagttcccttcccaatcctacaaaggagccttcctcccagaacctgtggtccctgattttggagggggaacttcttgcttctcattttgctaaggaagtttattttggtgaagttgttcccattttgagccccgggactcttattttgatgatgtgtcaccccacattggcacctcctactaccaccacacaaacttagttcatatgcttttacttgggcaagggtgctttccttccaataccccagtagcttttattttagtaaagggaccctttcccctagcctagggtcccatattgggtcaagctgcttacctgcctcagcccaggattttttattttgggggaggtaatgccctgttgttaccccaaggcttctttttttttttttttttttttgggtgaggggaccctactttgttatcccaagtgctcttattctggtgagaagaaccttaattccataatttgggaaggaatggaagatggacaccaccggacaccaccagacaataggatgggatggatggttttttgggggatgggctaggggaaataaggcttgctgtttgttttcctggggcgctccctccaattttgcagatttttgcaacctcctcctgagccgggattgtccaattactaaaatgtaaataatcacgtattgtggggaggggagttccaagtgtgccctccttttttttcctgcctggattatttaaaaagccatgtgtggaaacccactatttaataaaagtaatagaatcagaaaaaaaaaaaaaaaaaaa

SEQ ID NO: 93 - DNA, 415 bp, Homo sapiens
ccgctgcgtgttttcctcttgatcgggaactcctgcttctccttgcctcgaaatggaccccaactgctcctgctcgcctgttggctcctgtgcctgtgccggctcctgcaaatgcaaagagtgcaaatgcacctcctgcaagaagagctgctgctcctgctgccctgtgggctgtgcmaagtgtgcccagggctgcatctgcaaagggacgtcagacaagtgcagctgctgtgcctgatgccaggacagctgtgctctcagatgtaaatagagcaacctatataaacctggatttttttttttttttttttgtacaaccctgacccgtttgctacatctttttttctatgaaatatgtgaatggcaataaattcatctagactaaaaaaaaaaaaaaaaaaaaaaaaaaaaaaaa

SEQ ID NO: 94 - DNA, 5725 bp, Homo sapiens
cctggaggagggctctggaagtcacgtcaggttggctcttcaggttcatttccatagttccctgcggcctctgccttggggagttatgttttgttaccgagatccgcgctaccagattgcaccggggctgatttgggggctgggaatttgccattctgctgtacagacactgatttttttttcttctttttaaaaagcaaggtttgttttcattttggattttaggtgatgggcaagtcagaaagtcagatggatataactgatatcaacactccaaagccaaagaagaaacagcgatggactcgactggagatcagcctctcggtccttgtcctgctcctcaccatcatagctgtgagaatgatcgcactctatgcaacctacgatgatggtatttgcaagtcatcagactgcataaaatcagctgctcgactgatccaaaacatggatgccaccactgagccttgtagagactttttcaaatatgcttgcggaggctggttgaaacgtaatgtcattcccgagaccagctcccgttacggcaactttgacattttaagagatgaactagaagtcgttttgaaagatgtccttcaagaacccaaaactgaagatatagtagcagtgcagaaagcaaaagcattgtacaggtcttgtataaatgaatctgctattgatagcagaggtggagaacctctactcaaactgttaccagacatatatgggtggccagtagcaacagaaaactgggagcaaaaatatggtgcttcttggacagctgaaaaagctattgcacaactgaattctaaatatgggaaaaaagtccttattaatttgtttgttggcactgatgataagaattctgtgaatcatgtaattcatattgaccaacctcgacttggcctcccttctagagattactatgaatgcactggaatctataaagaggcttgtacagcatatgtggattttatgatttctgtggccagattgattcgtcaggaagaaagattgcccatcgatgaaaaccagcttgctttggaaatgaataaagttatggaattggaaaaagaaattgccaatgctacggctaaacctgaagatcgaaatgatccaatgcttctgtataacaagatgagattggcccagatccaaaataacttttcactagagatcaatgggaagccattcagctggttgaatttcacaaatgaaatcatgtcaactgtgaatattagtattacaaatgaggaagatgtggttgtttatgctccagaatatttaaccaaacttaagcccattcttaccaaatattctgccagagatcttcaaaatttaatgtcctggagattcataatggatcttgtaagcagcctcagccgaacctacaaggagtccagaaatgctttccgcaaggccctttatggtacaacctcagaaacagcaacttggagacgttgtgcaaactatgtcaatgggaatatggaaaatgctgtggggaggctttatgtggaagcagcatttgctggagagagtaaacatgtggtcgaggatttgattgcacagatccgagaagtttttattcagactttagatgacctcacttggatggatgccgagacaaaaaagagagctgaagaaaaggccttagcaattaaagaaaggatcggctatcctgatgacattgtttcaaatgataacaaactgaataatgagtacctcgagttgaactacaaagaagatgaatacttcgagaacataattcaaaatttgaaattcagccaaagtaaacaactgaagaagctccgagaaaaggtggacaaagatgagtggataagtggagcagctgtagtcaatgcattttactcttcaggaagaaatcagatagtcttcccagccggcattctgcagccccccttctttagtgcccagcagtccaactcattgaactatgggggcatcggcatggtcataggacacgaaatcacccatggcttcgatgacaatggcagaaactttaacaaagatggagacctcgttgactggtggactcaacagtctgcaagtaactttaaggagcaatcccagtgcatggtgtatcagtatggaaacttttcctgggacctggcaggtggacagcaccttaatggaattaatacactgggagaaaacattgctgataatggaggtcttggtcaagcatacagagcctatcagaattatattaaaaagaatggcgaagaaaaattacttcctggacttgacctaaatcacaaacaactatttttcttgaactttgcacaggtgtggtgtggaacctataggccagagtatgcggttaactccattaaaacagatgtgcacagtccaggcaatttcaggattattgggactttgcagaactctgcagagttttcagaagcctttcactgccgcaagaattcatacatgaatccagaaaagaagtgccgggtttggtgatcttcaaaagaagcattgcagcccttggctagacttgccaacaccacagaaatggggaattctctaatcgaaagaaaatgggccctaggggtcactgtactgacttgagggtgattaacagagagggcaccatcacaatacagataacattaggttgtcctagaaagggtgtggagggaggaagggggtctaaggtctatcaagtcaatcatttctcactgtgtacataatgcttaatttctaaagataatattactgtttatttctgtttctcatatggtctaccagtttgctgatgtccctagaaaacaatgcaaaacctttgaggtagaccaggatttctaatcaaaagggaaaagaagatgttgaagaatagagttaggcaccagaagaagagtaggtgacactatagtttaaaacacattgcctaactactagtttttacttttatttgcaacatttacagtccttcaaaatccttccaaagaattcttatacacattggggccttggagcttacatagttttaaactcatttttgccatacatcagttattcattctgtgatcatttattttaagcactcttaaagcaaaaaatgaatgtctaaaattgttttttgttgtacctgctttgactgatgctgagattcttcaggcttcctgcaattttctaagcaatttcttgctctatctctcaaaacttggtatttttcagagatttatataaatgtaaaaataataatttttatatttaattattaactacatttatgagtaactattattataggtaatcaatgaatattgaagtttcagcttaaaataaacagttgtgaaccaagatctataaagcgatatacagatgaaaatttgagactatttaaacttataaatcatattgatgaaaagatttaagcacaaactttagggtaaaaattgcgattggacagttgtctagagatatatatacttgtggttttcaaattggactttcaaaattaaatctgtccctgagagtgtctctgataaaagggcaaatctgcacctatgtagctctgcatctcctgtcttttcaggtttgtcatcagatggaaatattttgataataaattgaaattgtgaactcattgctccctaagactgtgacaactgtctaactttagaagtgcatttctgaatagaaatgggaggcctctgatggaccttctagaattataagtcacaaagagttctggaaaagaactgtttactgcttgataggaattcatcttttgaggcttctgttcctctcttttcctgttgtattgactattttcgttcattacttgattaagattttacaaaagaggagcacttccaaaattcttatttttcctaacaaaagatgaaagcagggaatttctatctaaatgatgagtattagttccctgtctcttgaaaaatgcccatttgcctttaaaaaaaaaagttacagaaatactataacatatgtacataaattgcataaagcataagtatacagttcaataaacttaactttaactgaacaatggccctgtagccagcacctgtaagaaacagagcagtaccagcgctctaaaagcacctccttgtcactttattactcccagaacaacaactatcctgacttctaatatcattcactagctttgcctggttttgtcttttatgcagatagaatcaatcagtatgtattcttttgtgcctggcttctttctctcagccttacatttgtgagattcctctgtattgtgctgattgtggatcttttcattctcattgcagaataatgttctattgtgggacttattacaatttgttcatcctattgttgatgggcacttgagaactttccattttggcgctattacaaatagtgcaactatgaatgtactgcatgttaccatcttacttgagcctttaatggacttatttcttcaaatccttccaaaaattattataagcattgaaattatagtttcaagccaactgtggatacccttaccctttcctcctttatcacaaccaccgttacaagtatacttatatttccctaaaatacatttaaaacttacctaagtgacatttgtagttggagtaataggagcttccagctctaataaaacagctgtctctaacttattttatttccatcatgtcagagcaggtgaagagccagaagtgaagagtgactagtacaaattataaaaagccactagactcttcactgttagctttttaaaacattaggctcccatccctatggaggaacaactctccagtgcctggatcccctctgtctacaaatataagattttctgggcctaaaggatagatcaaagtcaaaaatagcaatgcctccctatccctcacacatccagacatcatgaattttacatggtactcttgttgagttctatagagccttctgatgtctctaaagcactaccgattctttggagttgtcacatcagataagacatatctctaattccatccataaatccagttctactatggctgagttctggtcaaagaaagaaagtttagaagctgagacacaaagggttgggagctgatgaaactcacaaatgatggtaggaagaagctctcgacaatacccgttggcaaggagtctgcctccatgctgcagtgttcgagtggattgtaggtgcaagatggaaaggattgtaggtgcaagctgtccagagaaaagagtccttgttccagccctattctgccactcctgacagggtgaccttgggtatttgcaatattcctttgggcctctgcttctctcacctaaaaaaagagaattagattatattggtggttctcagcaagagaaggagtatgtgtccaatgctgccttcccatgaatctgtctcccagttatgaatcagtgggcaggataaactgaaaactcccatttaagtgtctgaatcgagtgagacaaaattttagtccaaataacaagtaccaaagttttatcaagtttgggtctgtgctgctgttactgttaaccatttaagtggggcaaaaccttgctaattttctcaaaagcatttatcattcttgttgccacagctggagctctcaaactaaaagacatttgttattttggaaagaagaaagactctattctcaaagtttcctaatcagaaatttttatcagtttccagtctcaaaaatacaaaataaaaacaaacgtttttaatact

SEQ ID NO: 95 - DNA, 3259 bp, Homo sapiens
gacgcgcgccgggagccggcggccgggccagccggcgccggggcccagtgcgccgcgctcgcagccggtagcgcgccagccgtaggcgtcgctcggcagccgcggggccctaggcgtgccggggagggggcgagggcggccaggcgcctgccgccccggaggcaggatgagcatcgagatcccggcgggactgacggagctgctgcagggcttcacggtggaggtgctgaggcaccagcccgcggacctgctggagttcgcgctgcagcacttcacccgcctgcagcaggagaacgagcgcaaaggcaccgcgcgcttcggccatgagggcaggacctggggggacctgggcgccgctgccgggggcggcacccccagcaagggggtcaacttcgccgaggagcccatgcagtccgactccgaggacggggaggaggaggaggcggcgcccgcggacgcaggggcgttcaatgctccagtaataaaccgattcacaaggcgtgcctcagtatgtgcagaagcttataatcctgatgaagaagaagatgatgcagagtccaggattatacatccaaaaactgatgatcaaagaaataggttgcaagaggcttgcaaagacatcctgctgtttaagaatctggatccggagcagatgtctcaagtattagatgccatgtttgaaaaattggtcaaagatggggagcatgtaattgatcaaggtgacgatggtgacaacttttatgtaattgatagaggcacatttgatatttatgtgaaatgtgatggtgttggaagatgtgttggtaactatgataatcgtgggagtttcggcgaactggccttaatgtacaatacacccagagcagctacaatcactgctacctctcctggtgctctgtggggtttggacagggtaaccttcaggagaataattgtgaaaaacaatgccaaaaagagaaaaatgtatgaaagctttattgagtcactgccattccttaaatctttggagttttctgaacgcctgaaagtagtagatgtgataggcaccaaagtatacaacgatggagaacaaatcattgctcagggagattcggctgattcttttttcattgtagaatctggagaagtgaaaattactatgaaaagaaagggtaaatcagaagtggaagagaatggtgcagtagaaatgcctcgatgctcgcggggacagtactttggagagcttgccctggtaactaacaaacctcgagcagcttctgcccacgccattgggactgtcaaatgtttagcaatggatgtgcaagcatttgaaaggcttctgggaccttgcatggaaattatgaaaaggaacatcgctacctatgaagaacagttagttgccctgtttggaacgaacatggatattgttgaacccactgcatgaagcaaaagtatggagcaagacctgtagtgacaaaattacacagtagtggttagtccactgagaatgtgtttgtgtagatgccaagcattttctgtgatttcaggttttttcctttttttacatttacaacgtatcaataaacagtagtgatttaatagtcaataggctttaacatcactttctaaagagtagttcataaaaaaatcaacatactgataaaatgactttgtactccacaaaattatgactgaaaggtttattaaaatgattgtaatatatagaaagtatctgtgtttaagaagataattaaaggatgttatcataggctatatgtgttttacttattcagactgataatcatattagtgactatccccatgtaagagggcacttggcaattaaacatgctacacagcatggcatcacttttttttataactcattaaacacagtaaaattttaatcatttttgttttaaagttttctagcttgataagttatgtgctgccttggcctattggtgaaatggtataaaatatcatatgcagttttaaaactttttatatttttgcaataaagtacattttgactttgttggcataatgtcagtaacatacatattccagtggttttatggacaggcaatttagtcattatgataataaggaaaacagtgttttagatgagagatcattaatgcatttttccctcatcaagcatatatctgcttttttttattttgcaattctctgtattctatgtctttaaaaatttgatcttgacatttaatgtcacaaagttttgtttttttaaaaagtgatttaaacttaagatccgacattttttgtattctttaagattttacacctaaaaaatctctcctatcccaaaaataatgtgggatccttatcagcatgcccacagtttatttctttgttcttcactaggcctgcataatacagtcctatgtagacatctgttcccttgggtttccgttctttcttaggatggttgccaacccacaatctcattgatcagcagccaatatgggtttgtttggtttttttaattcttaaaaacatcctctagaggaatagaaacaaatttttatgagcataaccctatataaagacaaaatgaatttctgaccttaccatatataccattaggccttgccattgctttaatgtagactcatagttgaaattagtgcagaaagaactcagatgtactagattttcattgttcattgatatgctcagtatgctgccacataagatgaatttaattatattcaaccaaagcaatatactcttacatgatttctaggccccatgacccagtgtctagagacattaattctaaccagttgtttgcttttaaatgagtgatttcattttgggaaacaggtttcaaatgaatatatatacatgggtaaaattactctgtgctagtgtagtcttactagagaatgtttatggtcccacttgtatatgaaaatgtggttagaatgttaattggataatgtatatataagaagttaaagtatgtaaagtataacttcagccacatttttagaacactgtttaacatttttgcaaaaccttcttgtaggaaaagagagctctctacatgaagatgacttgttttatatttcagattttattttaaaagccatgtctgttaaacaagaaaaaacacaaaagaactccagattcctggttcatcattctgtattcttactcactttttcaagttatctattttgttgcataaactaattgttaactattcatggaacagcaaacgcctgtttaataaagaactttgaccaag

SEQ ID NO: 96 - DNA, 2376 bp, Homo sapiens
cgagggcagcgccggtcgggagcgcagcgcggcgcagctcggcgcgcacggcgggagcggcgcgcgagtggtcgggcctggcggctggacgggcgcccctcgctgccccgcgcgctccccgccgccccccatgagcgcagccccgcgcggcccgggtccgtaggcggcggggcgccccccatgctgctgcagcccgcgccgtgcgccccgagcgcgggcttcccgcggcccctggccgcccccggcgccatgcacggctcgcagaaggacaccacgttcaccaagatcttcgtgggcggcctgccgtaccacactaccgacgcctcgctcaggaagtacttcgagggcttcggcgacatcgaggaggccgtggtcatcaccgaccgccagacgggcaagtcccgcggctacggcttcgtgaccatggccgaccgggcggcagctgagagggcttgcaaagacccgaaccccatcatcgacggccgcaaggccaacgtgaacctggcatatctgggcgccaagccgcggagcctccagacgggctttgccattggggtgcagcagctgcaccccaccttgatccagcggacttacgggctgaccccgcactacatctacccaccagccatcgtgcagcccagcgtggtgatcccagccgcccctgtcccgtcgctgtcctcgccctacattgagtacacgccggccagcccggcctacgcccagtacccaccggccacctatgaccagtacccatacgccgcctcgcctgccacggctgccagcttcgtgggctacagctaccctgccgccgtgccccaggccctctcagccgcagcacccgcgggcaccactttcgtgcagtaccaggcgccgcagctgcagcctgacaggatgcagtgaggggcgttcctgccccgaggactgtggcattgtcaccttcacagcagacagagctgccaggccatgatgggctggcgacagcccggctgagctttagtgaggtgccaccagcacccgtgcctccgaagaccgctcgggcattccgcctgcgccctgggacagcggagagatggcttctctttaatctaggtcccattgtgtcttgagggaggactttaagaatgactgagaactatttaaagacgcaatcccaggttccttgcacaccatggcagcctcttcttgcaccttctcctgcctctccacactccaggttccctcaggcttgtgtccccactgctgcatcgtggcggggtgtcacagaccctctgcagcccctggctgccctggactgtgcagagatgcctgactccagggaaacctgaaagcaagaagttaatggactgtttattgtaacttgatcctcccgagctgtgagcgcagtctgaggtgtgaggacacggcctcctgttggagtcccattttctccatcagggcacgtgggcggcttcctcaagcccggaggagctcccaggcgcacaggggccgccggtaacaggggccgccggccaaaggcccctttccagtcatagcactgaagttgcaacttttttcttgtaattgttttgctactaagataatttcagaagttcagtctattttttcagcggatactgccgccaccaagaatccaaaacctatttttgacttggagagacttgcttttgttggttccgcccgtggagacgacgacagtgtttctgtataataaagtgtctgccggctcgcgggccaggatcctctcggtgggatgggcaccacagacaggaggcccctcaggcccgtgcgggccactgtctgctgccgcctgccggggtggcagagtgagttgtctcaggaccccgtcactgcgacgttgacactctctccttccttccttccccaactccccaaacactgtggaagggaagaaggaagtgatccacagcattcaggccacttggggtctagaccatggtggtgccagcctggggggggcagtggccctcagctctgcccgctggagcggttgagtgcagaagggtgcgcctcttccctctacccccgcaccacctgctgtgtgccagcctgagacggttcctgcctgtcttgggggttggtggagggtggaggcagttctgccagccgtggcagggctgctatggggcatccagggctgtgggggtctggaggaggggacatgaggtgagaggtatcctggccgagggcggggggcagcggggggtctccctccggacctacctcagggagctgagcgtgcaggcgctccagggcaggcctgggacagagtcaaggctcagagaataaaggtagctaatctcatcataatatttttattagaatgttctgatgataaaaataaaacttgttttcttt

SEQ ID NO: 97 - DNA, 21 bp, Artificial Sequence
  Primer
gttgtaaaacgacggccagtg

SEQ ID NO: 98 - DNA, 19 bp, Artificial Sequence
  Primer
cacacaggaaacagctatg

SEQ ID NO: 99 - DNA, 21 bp, Artificial Sequence
  Primer
ttttttttttttttttttttv

SEQ ID NO: 100 - DNA, 11185 bp, Homo sapiens
gctgccccgagcctttctggggaagaactccaggcgtgcggacgcaacagccgagaacattaggtgttgtggacaggagctgggaccaagatcttcggccagccccgcatcctcccgcatcttccagcaccgtcccgcaccctccgcatccttccccgggccaccacgcttcctatgtgacccgcctgggcaacgccgaacccagtcgcgcagcgctgcagtgaattttccccccaaactgcaataagccgccttccaaggccaagatgttcataaatataaagagcatcttatggatgtgttcaaccttaatagtaacccatgcgctacataaagtcaaagtgggaaaaagcccaccggtgaggggctccctctctggaaaagtcagcctaccttgtcatttttcaacgatgcctactttgccacccagttacaacaccagtgaatttctccgcatcaaatggtctaagattgaagtggacaaaaatggaaaagatttgaaagagactactgtccttgtggcccaaaatggaaatatcaagattggtcaggactacaaagggagagtgtctgtgcccacacatcccgaggctgtgggcgatgcctccctcactgtggtcaagctgctggcaagtgatgcgggtctttaccgctgtgacgtcatgtacgggattgaagacacacaagacacggtgtcactgactgtggatggggttgtgtttcactacagggcggcaaccagcaggtacacactgaattttgaggctgctcagaaggcttgtttggacgttggggcagtcatagcaactccagagcagctctttgctgcctatgaagatggatttgagcagtgtgacgcaggctggctggctgatcagactgtcagatatcccatccgggctcccagagtaggctgttatggagataagatgggaaaggcaggagtcaggacttatggattccgttctccccaggaaacttacgatgtgtattgttatgtggatcatctggatggtgatgtgttccacctcactgtccccagtaaattcaccttcgaggaggctgcaaaagagtgtgaaaaccaggatgccaggctggcaacagtgggggaactccaggcggcatggaggaacggctttgaccagtgcgattacgggtggctgtcggatgccagcgtgcgccaccctgtgactgtggccagggcccagtgtggaggtggtctacttggggtgagaaccctgtatcgttttgagaaccagacaggcttccctccccctgatagcagatttgatgcctactgctttaaacctaaagaggctacaaccatcgatttgagtatcctcgcagaaactgcatcacccagtttatccaaagaaccacaaatggtttctgatagaactacaccaatcatccctttagttgatgaattacctgtcattccaacagagttccctcccgtgggaaatattgtcagttttgaacagaaagccacagtccaacctcaggctatcacagatagtttagccaccaaattacccacacctactggcagtaccaagaagccctgggatatggatgactactcaccttctgcttcaggacctcttggaaagctagacatatcagaaattaaggaagaagtgctccagagtacaactggcgtctctcattatgctacggattcatgggatggtgtcgtggaagataaacaaacacaagaatcggttacacagattgaacaaatagaagtgggtcctttggtaacatctatggaaatcttaaagcacattccttccaaggaattccctgtaactgaaacaccattggtaactgcaagaatgatcctggaatccaaaactgaaaagaaaatggtaagcactgtttctgaattggtaaccacaggtcactatggattcaccttgggagaagaggatgatgaagacagaacacttacagttggatctgatgagagcaccttgatctttgaccaaattcctgaagtcattacggtgtcaaagacttcagaagacaccatccacactcatttagaagacttggagtcagtctcagcatccacaactgtttcccctttaattatgcctgataataatggatcatccatggatgactgggaagagagacaaactagtggtaggataacggaagagtttcttggcaaatatctgtctactacaccttttccatcacagcatcgtacagaaatagaattgtttccttattctggtgataaaatattagtagagggaatttccacagttatttatccttctctacaaacagaaatgacacatagaagagaaagaacagaaacactaataccagagatgagaacagatacttatacagatgaaatacaagaagagatcactaaaagtccatttatgggaaaaacagaagaagaagtcttctctgggatgaaactctctacatctctctcagagccaattcatgttacagagtcttctgtggaaatgaccaagtcttttgatttcccaacattgataacaaagttaagtgcagagccaacagaagtaagagatatggaggaagactttacagcaactccaggtactacaaaatatgatgaaaatattacaacagtgcttttggcccatggtactttaagtgttgaagcagccactgtatcaaaatggtcatgggatgaagataatacaacatccaagcctttagagtctacagaaccttcagcctcttcaaaattgccccctgccttactcacaactgtggggatgaatggaaaggataaagacatcccaagtttcactgaagatggagcagatgaatttactcttattccagatagtactcaaaagcagttagaggaggttactgatgaagacatagcagcccatggaaaattcacaattagatttcagccaactacatcaactggtattgcagaaaagtcaactttgagagattctacaactgaagaaaaagttccacctatcacaagcactgaaggccaagtttatgcaaccatggaaggaagtgctttgggtgaagtagaagatgtggacctctctaagccagtatctactgttccccaatttgcacacacttcagaggtggaaggattagcatttgttagttatagtagcacccaagagcctactacttatgtagactcttcccataccattcctctttctgtaattcccaagacagactggggagtgttagtaccttctgttccatcagaagatgaagttctaggtgaaccctctcaagacatacttgtcattgatcagactcgccttgaagcgactatttctccagaaactatgagaacaacaaaaatcacagagggaacaactcaggaagaattcccttggaaagaacagactgcagagaaaccagttcctgctctcagttctacagcttggactcccaaggaggcagtaacaccactggatgaacaagagggcgatggatcagcatatacagtctctgaagatgaattgttgacaggttctgagagggtcccagttttagaaacaactccagttggaaaaattgatcacagtgtgtcttatccaccaggtgctgtaactgagcacaaagtgaaaacagatgaagtggtaacactaacaccacgcattgggccaaaagtatctttaagtccagggcctgaacaaaaatatgaaacagaaggtagtagtacaacaggatttacatcatctttgagtccttttagtacccacattacccagcttatggaagaaaccactactgagaaaacatccctagaggatattgatttaggctcaggattatttgaaaagcccaaagccacagaactcatagaattttcaacaatcaaagtcacagttccaagtgatattaccactgccttcagttcagtagacagacttcacacaacttcagcattcaagccatcttccgcgatcactaagaaaccacctctcatcgacagggaacctggtgaagaaacaaccagtgacatggtaatcattggagaatcaacatctcatgttcctcccactacccttgaagatattgtagccaaggaaacagaaaccgatattgatagagagtatttcacgacttcaagtcctcctgctacacagccaacaagaccacccactgtggaagacaaagaggcctttggacctcaggcgctttctacgccacagcccccagcaagcacaaaatttcaccctgacattaatgtttatattattgaggtcagagaaaataagacaggtcgaatgagtgatttgagtgtaattggtcatccaatagattcagaatctaaagaagatgaaccttgtagtgaagaaacagatccagtgcatgatctaatggctgaaattttacctgaattccctgacataattgaaatagacctataccacagtgaagaaaatgaagaagaagaagaagagtgtgcaaatgctactgatgtgacaaccaccccatctgtgcagtacataaatgggaagcatctcgttaccactgtgcccaaggacccagaagctgcagaagctaggcgtggccagtttgaaagtgttgcaccttctcagaatttctcggacagctctgaaagtgatactcatccatttgtaatagccaaaacggaattgtctactgctgtgcaacctaatgaatctacagaaacaactgagtctcttgaagttacatggaagcctgagacttaccctgaaacatcagaacatttttcaggtggtgagcctgatgttttccccacagtcccattccatgaggaatttgaaagtggaacagccaaaaaaggggcagaatcagtcacagagagagatactgaagttggtcatcaggcacatgaacatactgaacctgtatctctgtttcctgaagagtcttcaggagagattgccattgaccaagaatctcagaaaatagcctttgcaagggctacagaagtaacatttggtgaagaggtagaaaaaagtacttctgtcacatacactcccactatagttccaagttctgcatcagcatatgtttcagaggaagaagcagttaccctaataggaaatccttggccagatgacctgttgtctaccaaagaaagctgggtagaagcaactcctagacaagttgtagagctctcagggagttcttcgattccaattacagaaggctctggagaagcagaagaagatgaagatacaatgttcaccatggtaactgatttatcacagagaaatactactgatacactcattactttagacactagcaggataatcacagaaagcttttttgaggttcctgcaaccaccatttatccagtttctgaacaaccttctgcaaaagtggtgcctaccaagtttgtaagtgaaacagacacttctgagtggatttccagtaccactgttgaggaaaagaaaaggaaggaggaggagggaactacaggtacggcttctacatttgaggtatattcatctacacagagatcggatcaattaattttaccctttgaattagaaagtccaaatgtagctacatctagtgattcaggtaccaggaaaagttttatgtccttgacaacaccaacacagtctgaaagggaaatgacagattctactcctgtctttacagaaacaaatacattagaaaatttgggggcacagaccactgagcacagcagtatccatcaacctggggttcaggaagggctgaccactctcccacgtagtcctgcctctgtctttatggagcagggctctggagaagctgctgccgacccagaaaccaccactgtttcttcattttcattaaacgtagagtatgcaattcaagccgaaaaggaagtagctggcactttgtctccgcatgtggaaactacattctccactgagccaacaggactggttttgagtacagtaatggacagagtagttgctgaaaatataacccaaacatccagggaaatagtgatttcagagcgattaggagaaccaaattatggggcagaaataaggggcttttccacaggttttcctttggaggaagatttcagtggtgactttagagaatactcaacagtgtctcatcccatagcaaaagaagaaacggtaatgatggaaggctctggagatgcagcatttagggacacccagacttcaccatctacagtacctacttcagttcacatcagtcacatatctgactcagaaggacccagtagcaccatggtcagcacttcagccttcccctgggaagagtttacatcctcagctgagggctcaggtgagcaactggtcacagtcagcagctctgttgttccagtgcttcccagtgctgtgcaaaagttttctggtacagcttcctccattatcgacgaaggattgggagaagtgggtactgtcaatgaaattgatagaagatccaccattttaccaacagcagaagtggaaggtacgaaagctccagtagagaaggaggaagtaaaggtcagtggcacagtttcaacaaactttccccaaactatagagccagccaaattatggtctaggcaagaagtcaaccctgtaagacaagaaattgaaagtgaaacaacatcagaggaacaaattcaagaagaaaagtcatttgaatcccctcaaaactctcctgcaacagaacaaacaatctttgattcacagacatttactgaaactgaactcaaaaccacagattattctgtactaacaacaaagaaaacttacagtgatgataaagaaatgaaggaggaagacacttctttagttaacatgtctactccagatccagatgcaaatggcttggaatcttacacaactctccctgaagctactgaaaagtcacattttttcttagctactgcattagtaactgaatctataccagctgaacatgtagtcacagattcaccaatcaaaaaggaagaaagtacaaaacattttccgaaaggcatgagaccaacaattcaagagtcagatactgagctcttattctctggactgggatcaggagaagaagttttacctactctaccaacagagtcagtgaattttactgaagtggaacaaatcaataacacattatatccccacacttctcaagtggaaagtacctcaagtgacaaaattgaagactttaacagaatggaaaatgtggcaaaagaagttggaccactcgtatctcaaacagacatctttgaaggtagtgggtcagtaaccagcacaacattaatagaaattttaagtgacactggagcagaaggacccacggtggcacctctccctttctccacggacatcggacatcctcaaaatcagactgtcaggtgggcagaagaaatccagactagtagaccacaaaccataactgaacaagactctaacaagaattcttcaacagcagaaattaacgaaacaacaacctcatctactgattttctggctagagcttatggttttgaaatggccaaagaatttgttacatcagcaccaaaaccatctgacttgtattatgaaccttctggagaaggatctggagaagtggatattgttgattcatttcacacttctgcaactactcaggcaaccagacaagaaagcagcaccacatttgtttctgatgggtccctggaaaaacatcctgaggtgccaagcgctaaagctgttactgctgatggattcccaacagtttcagtgatgctgcctcttcattcagagcagaacaaaagctcccctgatccaactagcacactgtcaaatacagtgtcatatgagaggtccacagacggtagtttccaagaccgtttcagggaattcgaggattccaccttaaaacctaacagaaaaaaacccactgaaaatattatcatagacctggacaaagaggacaaggatttaatattgacaattacagagagtaccatccttgaaattctacctgagctgacatcggataaaaatactatcatagatattgatcatactaaacctgtgtatgaagacattcttggaatgcaaacagatatagatacagaggtaccatcagaaccacatgacagtaatgatgaaagtaatgatgacagcactcaagttcaagagatctatgaggcagctgtcaacctttctttaactgaggaaacatttgagggctctgctgatgttctggctagctacactcaggcaacacatgatgaatcaatgacttatgaagatagaagccaactagatcacatgggctttcacttcacaactgggatccctgctcctagcacagaaacagaattagacgttttacttcccacggcaacatccctgccaattcctcgtaagtctgccacagttattccagagattgaaggaataaaagctgaagcaaaagccctggatgacatgtttgaatcaagcactttgtctgatggtcaagctattgcagaccaaagtgaaataataccaacattgggccaatttgaaaggactcaggaggagtatgaagacaaaaaacatgctggtccttcttttcagccagaattctcttcaggagctgaggaggcattagtagaccatactccctatctaagtattgctactacccaccttatggatcagagtgtaacagaggtgcctgatgtgatggaaggatccaatcccccatattacactgatacaacattagcagtttcaacatttgcgaagttgtcttctcagacaccatcatctcccctcactatctactcaggcagtgaagcctctggacacacagagatcccccagcccagtgctctgccaggaatagacgtcggctcatctgtaatgtccccacaggattcttttaaggaaattcatgtaaatattgaagcaactttcaaaccatcaagtgaggaataccttcacataactgagcctccctctttatctcctgacacaaaattagaaccttcagaagatgatggtaaacctgagttattagaagaaatggaagcttctcccacagaacttattgctgtggaaggaactgagattctccaagatttccaaaacaaaaccgatggtcaagtttctggagaagcaatcaagatgtttcccaccattaaaacacctgaggctggaactgttattacaactgccgatgaaattgaattagaaggtgctacacagtggccacactctacttctgcttctgccacctatggggtcgaggcaggtgtggtgccttggctaagtccacagacttctgagaggcccacgctttcttcttctccagaaataaaccctgaaactcaagcagctttaatcagagggcaggattccacgatagcagcatcagaacagcaagtggcagcgagaattcttgattccaatgatcaggcaacagtaaaccctgtggaatttaatactgaggttgcaacaccaccattttcccttctggagacttctaatgaaacagatttcctgattggcattaatgaagagtcagtggaaggcacggcaatctatttaccaggacctgatcgctgcaaaatgaacccgtgccttaacggaggcacctgttatcctactgaaacttcctacgtatgcacctgtgtgccaggatacagcggagaccagtgtgaacttgattttgatgaatgtcactctaatccctgtcgtaatggagccacttgtgttgatggttttaacacattcaggtgcctctgccttccaagttatgttggtgcactttgtgagcaagataccgagacatgtgactatggctggcacaaattccaagggcagtgctacaaatactttgcccatcgacgcacatgggatgcagctgaacgggaatgccgtctgcagggtgcccatctcacaagcatcctgtctcacgaagaacaaatgtttgttaatcgtgtgggccatgattatcagtggataggcctcaatgacaagatgtttgagcatgacttccgttggactgatggcagcacactgcaatacgagaattggagacccaaccagccagacagcttcttttctgctggagaagactgtgttgtaatcatttggcatgagaatggccagtggaatgatgttccctgcaattaccatctcacctatacgtgcaagaaaggaacagttgcttgcggccagccccctgttgtagaaaatgccaagacctttggaaagatgaaacctcgttatgaaatcaactccctgattagataccactgcaaagatggtttcattcaacgtcaccttccaactatccggtgcttaggaaatggaagatgggctatacctaaaattacctgcatgaacccatctgcataccaaaggacttattctatgaaatactttaaaaattcctcatcagcaaaggacaattcaataaatacatccaaacatgatcatcgttggagccggaggtggcaggagtcgaggcgctgatccctaaaatggcgaacatgtgttttcatcatttcagccaaagtcctaacttcctgtgcctttcctatcacctcgagaagtaattatcagttggtttggatttttggaccaccgttcagtcattttgggttgccgtgctcccaaaacattttaaatgaaagtattggcattcaaaaagacagcagacaaaatgaaagaaaatgagagcagaaagtaagcatttccagcctatctaatttctttagttttctatttgcctccagtgcagtccatttcctaatgtataccagcctactgtactatttaaaatgctcaatttcagcaccgatggccatgtaaataagatgatttaatgttgattttaatcctgtatataaaataaaaagtcacaatgagtttgggcatatttaatgatgattatggagccttagaggtctttaatcattggttcggctgcttttatgtagtttaggctggaaatggtttcacttgctctttgactgtcagcaagactgaagatggcttttcctggacagctagaaaacacaaaatcttgtaggtcattgcacctatctcagccataggtgcagtttgcttctacatgatgctaaaggctgcgaatgggatcctgatggaactaaggactccaatgtcgaactcttctttgctgcattcctttttcttcacttacaagaaaggcctgaatggaggacttttctgtaaccagg

SEQ ID NO: 101 - DNA, 255 bp, Homo sapiens
tggtttactccgacatgcacatctattaaactgtacagacaatgggagcaagcccattgtagggagagtttgtctcacatcctacgcagccctggggccaatgcatgggaaaaactcagtgatgccaaaccagaggcagacctgcccattcacagctctgaggggaaataaaacgtgggaggaaggcaagagacacacaaaaaataaacatactaagtgaaaggggggtggtgtaggcccatttggaggtcctgt

SEQ ID NO: 102 - DNA, 2972 bp, Homo sapiens
gcgcgcggctccgatgggaagcatgacccgggtggcgggacaagacttgcttcccggccacgcgcgctcggccggccgtggggcggggcataggcgtgacgtggtgtcgcgtatcgagtctccgcccccttcccgcctccccgtatataagacttcgccgagcactctcactcgcacaagtggaccggggtgttgggtgctagtcggcaccagaggcaagggtgcgaggaccacggccggctcggacgtgtgaccgcgcctagggggtggcagcgggcagtgcggggcggcaaggcgaccatggarcttttgcggactatcacctaccagccagccgccagcaccaaaatgtgcgagcaggcgctgggcaagggttgcggaggggactcgaagaagaagcggccgccgcagccccccgaggaatcgcagccacctcagtcccaggcgcaagtgcccccggcggcccctcaccaccatcaccaccattcgcactcggggccggagatctcgcggattatcgtcgaccccacgactgggaagcgctactgccggggcaaagtgctgggaaagggtggctttgcaaaatgttacgagatgacagatttgacaaataacaaagtctacgccgcaaaaattattcctcacagcagagtagctaaacctcatcaaagggaaaagattgacaaagaaatagagcttcacagaattcttcatcataagcatgtagtgcagttttaccactacttcgaggacaaagaaaacatttacattctcttggaatactgcagtagaaggtcaatggctcatattttgaaagcaagaaaggtgttgacagagccagaagttcgatactacctcaggcagattgtgtctggactgaaataccttcatgaacaagaaatcttgcacagagatctcaaactagggaacttttttattaatgaagccatggaactaaaagttggggacttcggtctggcagccaggctagaacccytggaacacagaaggagaacgatatgtggtaccccaaattatctctctcctgaagtcctcaacaaacaaggacatggctgtgaatcagacatttgggccctgggctgtgtaatgtatacaatgttactagggaggcccccatttgaaactacaaatctcaaagaaacttataggtgcataagggaagcaaggtatacaatgccgtcctcattgctggctcctgccaagcacttaattgctagtatgttgtccaaaaacccagaggatcgtcccagtttggatgacatcattcgacatgacttttttttgcagggcttcactccggacagactgtcttctagctgttgtcatacagttccagatttccacttatcaagcccagctaagaatttctttaagaaagcagctgctgctctttttggtggcaaaaaagacaaagcaagatatattgacacacataatagagtgtctaaagaagatgaagacatctacaagcttaggcatgatttgaaaaagacttcaataactcagcaacccagcaaacacaggacagatgaggagctccagccacctaccaccacagttgccaggtctggaacacccgcagtagaaaacaagcagcagattggggatgctattcggatgatagtcagagggactcttggcagctgtagcagcagcagtgaatgccttgaagacagtaccatgggaagtgttgcagacacagtggcaagggttcttcggggatgtctggaaaacatgccggaagctgattgcattcccaaagagcagctgagcacatcatttcagtgggtcaccaaatgggttgattactctaacaaatatggctttgggtaccagctctcagaccacaccgtcggtgtccttttcaacaatggtgctcacatgagcctccttccagacaaaaaaacagttcactattacgcagagcttggccaatgctcagttttcccagcaacagatgctcctgagcaatttattagtcaagtgacggtgctgaaatacttttctcattacatggaggagaacctcatggatggtggagatctgcctagtgttactgatattcgaagacctcggctctacctccttcagtggctaaaatctgataaggccctaatgatgctctttaatgatggcacctttcaggtgaatttctaccatgatcatacaaaaatcatcatctgtagccaaaatgaagaataccttctcacctacatcaatgaggataggatatctacaactttcaggctgacaactctgctgatgtctggctgttcatcagaattaaaaaatcgaatggaatatgccctgaacatgctcttacaaagatgtaactgaaagacttttcgaatggaccctatgggactcctcttttccactgtgagatctacagggaagccaaaagaatgatctagagtatgttgaagaagatggacatgtggtggtacgaaaacaattcccctgtggcctgctggactgggtggaacccagaaccaggctaaggcatacagttcttgactttggacaatcccaagagtgaaccagaatgcagttttccttgagatacctgttttaaaaggtttttcagacaattttgcagaaaggtgcattgattcttaaattctctctgttgagagcatttcagccagaggactttggaactgtgaatatacttcctgaaggggagggagaagggaggaagctcccatgttgtttaaaggctgtaattggagcagcttttggctgcgtaactgtgaactatggccatatataattttttttcattaatttttgaagatacttgtggctggaaaagtgcattccttgttaataaactttttatttattacagcccaaagagcagtatttattatcaaaatgtctttttttttatgttgaccattttaaaccgttggcaataaagagtatgaaaacgcaaaaaaaaaaaaaaa

SEQ ID NO: 103 - DNA, 5054 bp, Homo sapiens
cgatactacgtgggcatttttggtcgaagagagctgaagtaatgagaagacatcatggaggcccagtcccacagctccacgaccactgaaaagaaaaaagttgagaattccatagtgaagtgctccactcgaacagatgtgagcgagaaagccgttgcctccagcaccacttctaatgaggatgaaagtcctggacagacttatcacagagagagaagaaacgcaatcactatgcagccacagaatgtccaggggctcagcaaagtcagtgaggaaccttcaacatcgagtgacgagagggcctcattgatcaagaaagagatccatgggtccctgccacacgtggcggagccctctgtgccgtaccgcgggacggtgtttgccatggaccccaggaatggttacatggagccccactaccaccctcctcatcttttccctgccttccatcctcctgtaccaattgatgccagacatcatgagggccgttaccattacgatccatctccgattcctccattgcatatgacttccgccttatctagtagccctacgtatccggacctgcccttcattaggatctccccacaccggaaccccgctgctgcttccgagtctcccttcagccctccacatccctacattaatccctacatggactatatccgctccttgcacagcagcccatcgctctccatgatctcagcaacccgtgggctgagccctacagatgcgccccatgcaggagtcagcccagcagaatactatcatcagatggccctgctaactggccagcgcagcccctatgcagacattattccctcagctgccaccgccggcacgggggccatccacatggaatatcttcatgctatggatagcaccagattctccagccccaggctgtcagccaggccgagccgaaaacgtacactgtccatatcaccactctccgatcatagctttgaccttcagaccatgataaggacgtctcccaactccttggtcacgattctcaataattcccgtagcagctcttcagcaagtggctcctatggtcacttatctgcaagtgcaatcagccctgccttgagcttcacctactcttccgcgcccgtctctctccacatgcatcagcagatcctaagccgacaacagagcttaggttcagcctttggacacagccctccactcatccaccctgccccaacttttccaacacagaggcctattccagggatccctacggttctgaaccccgtccaggtcagctccggcccttctgagtcctcacagaacaagcccacgagtgagtctgcagtgagcagcactggtgacccgatgcacaacaagaggtccaagatcaaacccgatgaagacctccccagcccaggggctcgggggcagcaggaacagcccgaaggaacaacccttgtcaaggaggaaggggacaaagatgaaagcaaacaggagcctgaagtcatctatgagacaaactgccactgggaaggctgcgcgagggagttcgacacccaagagcagcttgtgcaccatataaataacgaccatattcatggagagaagaaggagttcgtgtgcaggtggctggactgctcaagagagcagaaacccttcaaagcccagtatatgttggtagtgcatatgagaagacacacgggcgagaagcctcacaaatgcacttttgaaggttgcacaaaggcctactcgagactagaaaacttgaaaacacacttgagatctcacactggagagaaaccatacgtctgtgagcacgaaggttgcaacaaggctttctcaaatgcctctgatcgcgccaaacaccaaaacagaacgcattccaatgagaaaccatatgtgtgcaaaatcccaggctgcactaagcgttacacagacccaagctccctccggaaacatgtgaagacagtgcatggcccagaggctcatgtcaccaagaagcagcgaggggacatccatcctcggccgccacccccgagagattccggcagccattcacagtccaggtcgcctggccgaccgactcagggagcccttggtgagcagcaggacctcagcaacactacctcaaagcgggaagaatgcctccaggtgaaaaccgtcaaggcagagaagccaatgacatctcagccaagccctggtggtcagtcttcatgcagcagccaacagtcccccatcagcaactattccaacagtgggctcgagcttcctctgaccgatggaggtagtataggagacctcagtgccatcgatgaaaccccaatcatggactcaaccatttccactgcaaccacagcccttgctttgcaagccaggagaaacccggcagggaccaaatggatggagcacgtaaaactagaaaggctaaaacaagtgaatggaatgtttccgcgactgaaccccattctaccccctaaagcccctgcggtctctcctctcataggaaatggcacacagtccaacaacacctgcagcttgggtgggcccatgacgcttctcccgggcagaagcgacctctctggggtggacgtcactatgctgaacatgctcaacagaagggacagcagcgccagcaccatcagctcggcctacctgagcagccgccgctcctcagggatctcgccctgcttctccagccgccgctccagcgaggcgtcacaggccgagggccggccgcagaacgtgagcgtggccgactcctacgaccccatctccaccgacgcctcgcgccgctccagcgaagccagccagagcgacggcctgcccagcctgctcagcctcacgcccgcccagcagtaccgcctcaaggccaagtacgcggctgccacaggagggccgccgccgacgcccctgcccaacatggagaggatgagcctgaagacgcgcctggcgctgctcggggatgccctcgagcctggcgtggccctgcctccagttcatgccccgaggaggtgcagcgacgggggagcccacggctacgggcggcgccacctgcagccgcacgatgcgctgggccacggcgtgaggagggccagcgacccggtgcggacaggctccgagggcctggccctgcctcgtgtgccgcgcttcagcagcctcagcagctgcaaccccccggcgatggccacgtccgcggagaagcgcagtctcgtgcttcagaattacacgcggcccgagggcggccagtcccgaaacttccactcgtccccctgtcctcccagcatcaccgagaacgtcaccctggagtccctgaccatggacgctgatgccaacctgaacgatgaggatttcctgccggacgacgtggtgcagtatttaaattcccagaaccaagcagggtacgagcagcacttccccagcgccctcccggacgacagcaaagtgccccacgggcccggtgactttgacgcgcccgggctgccagacagccacgctggccagcagttccatgccctcgagcagccctgccccgagggcagcaaaaccgacctgcccattcagtggaacgaagtcagctccggaagcgccgacctgtcctcctccaagctcaagtgtgggccgcggcccgctgtgccgcagactcgcgcctttgggttctgcaacggcatggtcgtccacccgcagaaccccttgaggagcgggcctgctgggggctatcagaccctcggggagaacagcaacccctacggtggcccagagcacttgatgctccacaacagccccggaagtggcaccagtggaaacgccttccatgaacagccctgtaaggccccgcagtatgggaactgtctcaacaggcagccagtggcccctggtgcactcgacggtgcctgtggtgccgggattcaagcctcaaagctgaagagcacccccatgcaagggagcgggggccagctgaatttcggcctgccggtagcgccaaatgagtcagctggcagcatggtgaatggcatgcagaaccaggacccagtgggacaggggtacctggctcaccagctcctcggcgacagcatgcagcacccgggggcaggccgccccggtcagcagatgcttgggcagattagtgctacctcacacatcaacatctaccaagggccagagagctgcctgccaggggctcacggcatgggcagccagccgtcaagcttggcagttgtcaggggctaccagccatgtgccagctttgggggcagcaggcgccaggctatgccgagggacagccttgctctgcagtcaggacagctcagtgacacaagtcagacctgcagggtgaatggtatcaagatggagatgaaagggcagccccatccgctgtgctctaatctgcagaattactctggtcagttctatgaccaaaccgtgggcttcagtcagcaagacacgaaagctggttcattctctatttcagacgccagctgcctgctacaggggaccagcgccaaaaactctgagttactttccccaggtgctaatcaggtgacaagcacagtggacagcctcgacagccatgacctggaaggggtacagattgacttcgatgccatcatagacgatggggaccactccagcctgatgtcgggggccctgagcccaagtatcattcagaacctttcccatagctcctcccgcctcaccacgcctcgggcgtccctcccattcccagcgctgtccatgagcaccaccaacatggctatcggggacatgagttctttgctgacctccctagcggaagaaagcaaattccttgcagttatgcaataggctttaggaaaaaaagactgcaaccaacggaaatcaataggagttgaagagattaaactgactttgttttggctgtttttttagttctgtatgtattttagcaatctcatctcacctaactgagatgtgtttcaattatattccttttatggaaaaggactctgaaaaaccctaaagtattctagggagaaactgtcttccatttcagttttgaatcagtattgttacactcaaaccaccctctttttaaaaaaaaa

SEQ ID NO: 104 - DNA, 2257 bp, Homo sapiens
acggcagccgtcagggaccgtcccccaactcccctttccgctcaggcagggtcctcgcggcccatgctggccgctggggacccgcgcagcccagaccgttcccgggccggccagccggcaccatggtggccctgaggcctgtgcagcaactccaggggggctaaagggctcagagtgcaggccgtggggcgcgagggtcccgggcctgagccccgcgccatggccggggccatcgcttcccgcatgagcttcagctctctcaagaggaagcaacccaagacgttcaccgtgaggatcgtcaccatggacgccgagatggagttcaattgcgagatgaagtggaaagggaaggacctctttgatttggtgtgccggactctggggctccgagaaacctggttctttggactgcagtacacaatcaaggacacagtggcctggctcaaaatggacaagaaggtactggatcatgatgtttcaaaggaagaaccagtcacctttcacttcttggccaaattttatcctgagaatgctgaagaggagctggttcaggagatcacacaacatttattcttcttacaggtaaagaagcagattttagatgaaaagatctactgccctcctgaggcttctgtgctcctggcttcttacgccgtccaggccaagtatggtgactacgaccccagtgttcacaagcggggatttttggcccaagaggaattgcttccaaaaagggtaataaatctgtatcagatgactccggaaatgtgggaggagagaattactgcttggtacgcagagcaccgaggccgagccagggatgaagctgaaatggaatatctgaagatagctcaggacctggagatgtacggtgtgaactactttgcaatccggaataaaaagggcacagagctgctgcttggagtggatgccctggggcttcacatttatgaccctgagaacagactgacccccaagatctccttcccgtggaatgaaatccgaaacatctcgtacagtgacaaggagtttactattaaaccactggataagaaaattgatgtcttcaagtttaactcctcaaagcttcgtgttaataagctgattctccagctatgtatcgggaaccatgatctatttatgaggagaaggaaagccgattctttggaagttcagcagatgaaagcccaggccagggaggagaaggctagaaagcagatggagcggcagcgcctcgctcgagagaagcagatgagggaggaggctgaacgcacgagggatgagttggagaggaggctgctgcagatgaaagaagaagcaacaatggccaacgaagcactgatgcggtctgaggagacagctgacctgttggctgaaaaggcccagatcaccgaggaggaggcaaaacttctggcccagaaggccgcagaggctgagcaggaaatgcagcgcatcaaggccacagcgattcgcacggaggaggagaagcgcctgatggagcagaaggtgctggaagccgaggtgctggcactgaagatggctgaggagtcagagaggagggccaaagaggcagatcagctgaagcaggacctgcaggaagcacgcgaggcggagcgaagagccaagcagaagctcctggagattgccaccaagcccacgtacccgcccatgaacccaattccagcaccgttgcctcctgacataccaagcttcaacctcattggtgacagcctgtctttcgacttcaaagatactgacatgaagcggctttccatggagatagagaaagaaaaagtggaatacatggaaaagagcaagcatctgcaggagcagctcaatgaactcaagacagaaatcgaggccttgaaactgaaagagagggagacagctctggatattctgcacaatgagaactccgacaggggtggcagcagcaagcacaataccattaaaaagctcaccttgcagagcgccaagtcccgagtggccttctttgaagagctctagcaggtgacccagccaccccaggacctgccacttctcctgctaccgggaccgcgggatggaccagatatcaagagagccatccatagggagctggctgggggtttccgtgggagctccagaactttccccagctgagtgaagagcccagcccctcttatgtgcaattgccttgaactacgaccctgtagagatttctctcatggcgttctagttctctgacctgagtctttgttttaagaagtatttgtct

SEQ ID NO: 105 - DNA, 1931 bp, Homo sapiens
gcccaagagcgagcgcgcagcacgaagctcgagccgcctccgccgcgcgaccccacctcggccgccgccgcctgcgccgcgagatccgccccggcctccccgagagcgagccccggccgccgcgaccaccagccgcgctaaccgccgaccaaccgccaccgaggcgcctgagcgagagcagaggaggaggaggcatgagtgaggcgggcgaggccaccaccaccaccaccaccaccctcccgcaggctccgacggaggcggccgccgcggctccccaggaccccgcgcccaagagcccggtgggcagcggtgcgccccaggccgcggccccggcgcccgccgcccacgtcgcaggaaaccccggtggggacgcggcccccgcagccacgggcaccgcggccgccgcctctttagccgccgccgccggcagcgaagacgcggagaaaaaagttctcgccaccaaagtccttggcactgtcaaatggttcaacgtcagaaatggatatggatttataaatcgaaatgacaccaaagaagatgtatttgtacatcagactgccatcaagaagaataacccacggaaatatctgcgcagtgtaggagatggagaaactgtagagtttgatgtggttgaaggagagaagggtgcagaagctgccaatgtgactggcccggatggagttcctgtggaagggagtcgttacgctgcagatcggcgccgttacagacgtggctactatggaaggcgccgtggccctccccggaattacgctggggaggaggaggaggaagggagcggcagcagtgaaggatttgacccccctgccactgataggcagttctctggggcccggaatcagctgcgccgcccccagtatcgccctcagtaccggcagcggcggttcccgccttaccacgtgggacagacctttgaccgtcgctcacgggtcttaccccatcccaacagaatacaggctggtgagattggagagatgaaggatggagtcccagagggagcacaacttcagggaccggttcatcgaaatccaacttaccgcccaaggtaccgtagcaggggacctcctcgcccacgacctgccccagcagttggagaggctgaagataaagaaaatcagcaagccaccagtggtccaaaccagccgtctgttcgccgtggatatcggcgtccctacaattaccggcgtcgcccgcgtcctcctaacgctccttcacaagatggcaaagaggccaaggcaggtgaagcaccaactgagaaccctgctccacccacccagcagagcagtgctgagtaacaccaggctcctcaggcaccttcaccatcggcaggtgacctaaagaattaatgaccattcagaaataaagcaaaaagcaggccacaaccttaaccaacaccaaagaaacatccaagcaataaagtggaagactaaccaagatttggacattggaatgtttactgttattctttaagaaacatctacaaaaagaaaatgtcaacaaatttttccagcaagctgagaacctgggaattcctgcacggaagacaagagagtagcctctccagtttcagcaaccgctaggtttctattttttttcctggtttttactgttttggtaatatatatattgaaacaagaaatattaataccacatggggagaaccccaaccaaagaaatctgaaatatatagtaaatgcttttttttccgtttttgttcattttggatgctggtgctaaacctccaagtgtcatgatttaaaaaaaaaaaaaatttatgtccttcttatttatttctaggatgaggggaggataacatttttgctttcttatgtgactctctttgaaaatgtgcagtaagaaattcctcaaaaataaaatttttacccttcagaggaaaaaaaaaaaaaaaaaaa

SEQ ID NO: 106 - DNA, 485 bp, Homo sapiens
tttttttttcaatttgaagttttatttaaaatgtaaaagaaatgttcccccaaaatgctggtgaataaagcaaaaggataccatacagtgctctcttcctacgagttagccagcctatccaagtacagggcgatatacagtacttaatgctggtagaatttcacagaagtttagtgttaaagattatctgtgcctagattatgaagagattctcagtgtgtgatgtttagttcagggtttacatcttactgggcatgaacaagagcccctgctccttggccatagccaaatcccttgggcccaaagttctttgcatagcatcctttacaatagatttcaccttctttttcagtcagagtcgttgattcaagactcttcccacactttgcacatcggaaacagtttttgtgccagggctttccagctccaattatcttctcggcagcatatacagaatccccacatttggaacacttctcagcacc

SEQ ID NO: 107 - DNA, 2520 bp, Homo sapiens
tatttattcagtgcggattgcagagggcgcagctccaccgtggtaacttgcaatgtggccgcccctgcgctggcttctttctcctcggccctcggtgaacccagcttttcctttaaagcatagacaaatccttgcttagggtcagccagaccgtgggcttgctttgggctcccgcgtggacgctgaaggctcttcatgatttctcagaaaccttggtgggccacccaaaaagtgtgttggaaatccacggtgatccttagtatggtgatgggattgtccgaaaaggatttcagatgcatgccaggtttccactgattgccagaactcgagatcactacacatggatccccaaaatcaacatggcagtggcagttcgttagttgtgatccagcagccttctttggatagccgtcagagattagactatgagagagagattcagcctactgctattttgtccttagaccagatcaaggccataagaggcagcaatgaatacacagaagggccttcggtggtgaaaagacctgctcctcggacagcaccaagacaagaaaagcatgaaaggactcatgaaatcataccaattaatgtgaataataactacgagcacagacacacaagccacctgggacatgcagtactcccaagtaatgccaggggccccattttgagcagatcaaccagcactggaagtgcagccagctctgggagcaacagcagtgcctcttctgaacagggactgttaggaaggtcaccaccaaccagaccagtccctggtcataggtctgaaagggcaatccggacccagcccaagcaactgattgtggatgacttgaagggttccttgaaagaggacctgacacagcacaagttcatttgtgaacagtgtgggaagtgcaagtgtggagaatgcactgctcccaggaccctaccatcctgtttggcctgtaaccggcagtgcctttgctctgctgagagcatggtggaatatggaacctgcatgtgcttagtcaagggcatcttctaccactgctccaatgacgacgaaggggattcctattcagataatccttgctcctgttcacaatcacactgctgctctagatacctgtgtatgggagccatgtctttatttttaccttgcttactctgttatcctcctgctaaaggatgcctgaagctgtgcaggaggtgttatgactggatccatcgcccagggtgcagatgtaagaactccaacactgtctattgtaagctggagagctgcccctcccggggtcagggtaaaccatcatgatttttggaggtgggttgtacctcctgaacttctagctttcaagttgtggctgttttttgtttttgtttttgtttttgttttctttagaatttttccctgtttcccaccttctcttcccctgttgccaaggtctaactcatggatttttctctttcctcatggatgatcttcagcaagagtggactgggaagctgcacctggctcccactttcaacaagagcctctgccatccacttgagggtattgagagccagtgggcttttgtgtagcctttttgttctgcaagcaactttctaaagttgtgtacatgaacatacacccacatccagactacagtgatttagagttgttttgattgggtaccgtgggagcagggaaattggttttttaaaaagcaactgtttaattgcttaaataagctatgtattaaatctgtctccagttagggctatcttcctagcataggccccttaagtagcatgggggatatattttttgctataacgtaaaaattttcctttaaccactgccctctcctttctccttcaaggttctttccccctcagttttgttgttgtcttactctggagatgccaagtgtattttttctttctatgtaattttagattcgccttacaatgtaaatcttcacattggagataatattggttggaccttgcccatcttcactctagccttcgtatttgtgaaggactcagccaccttccttcttcaccccatgcttctcaccaaatttttgttgtcattgagggcacttggataactcaagttgatatttatagctgatcaatctatatgtgtcacagaactatgctgcctaaagtgatcttggctccttaatggtccttttggccccttggatagttaacagctgagtaattctaatctcttctgtgttttccttgccttaaccacaaattgtggtgctttttgtatattttatgtataaatcacaaagttgacttctgactatttttaagacaaaagtctgttaaacttttttattgtaaagaatatttattatgcgaatctctattattttatggtatttattgcaaaagactgctgaaatgtactcatgtttgaatataacaaaatatcaatacttaacggaaaataaggtgacacgaagaaagtacatatgttaactataatgcagaaaatatattaattaatgaaaaaaaaaaaaaaaaaaaaaa

SEQ ID NO: 108 - DNA, 3235 bp, Homo sapiens
cgtgggagcagtggggttcgacggcgcggccgcgaggccgccatggccgctcacgggaagctgcggcgggagcgggggctgcaggctgagtatgagacgcaagtcaaagagatgcgctggcagctgagcgagcagctgcgctgcctggagctgcagggcgagctgcggcgggagttgctgcaggagctggcagagttcatgcggcgccgcgctgaggtggagctggaatactcccggggcctggaaaagctggccgagcgcttctccagccgtggaggccgcctggggagcagccgggagcaccaaagcttccggaaggagccgtccctcctgtcgcccttgcactgctgggcggtgctgctgcagcacacgcggcagcagagccgggagagcgcggccctgagtgaggtgctggccgggcccctggcccagcgcctgagtcacattgcagaggacgtggggcgcctggtcaagaagagcagggatctggagcagcagctgcaggatgagctcctggaggtggtctcagagctccagacggccaagaagacgtaccaggcatatcacatggagagcgtgaatgccgaggccaagctccgggaggccgagcggcaggaggagaagcgggcaggccggagtgtccccaccaccaccgctggtgccactgaggcagggcccctccgcaagagctccctcaagaagggagggaggctggtggagaagcggcaggccaagttcatggagcacaaactcaagtgcacaaaggcgcgcaacgagtacctgcttagcctggctagtgtcaacgctgctgtcagtaactactacctgcatgacgtcttggacctcatggactgctgtgacacagggttccacctggccctggggcaggtgctccggagctacacggccgctgagagccgcacccaagcctcccaagtgcagggcctgggcagcctggaagaagctgtggaggccctggatcctccaggggacaaagccaaggttctcgaggtgcatgctaccgtcttctgtcccccgctgcgctttgactaccacccccatgatggggatgaggtggctgagatctgcgttgaaatggagctgcgggacgagattctgcccagagcccagaacatccagagccgcctggaccgacagaccattgagacagaggaggtgaacaagactctgaaggcgacactgcaggccctgctggaggtggtggcctcggatgacggggatgtgcttgattccttccagaccagcccctccaccgagtccctcaagtccaccagctcagacccaggcagccggcaggcgggccggaggcgcggccagcagcaggagaccgaaaccttctacctcacgaagctccaggagtatctgagtggacggagcatcctcgccaagctgcaggccaagcacgagaagctgcaggaggcccttcagcgaggtgacaaggaggagcaggaggtgtcttggacccagtacacacagagaaaattccagaagagccgccagccccgccccagctcccagtataaccagagactctttgggggagacatggagaagtttatccagagctcaggccagcctgtgcccctggtggtggagagctgcattcgcttcatcaacctcaatggcctgcagcatgaaggcatcttccgggtatcgggtgcccagctccgggtctcagagatccgtgatgccttcgagagaggggaggacccactggtggagggctgcactgcccatgacctggactcggtggccggggtgctgaagctctacttccggagcctggagcccccactcttccccccagacctgttcggcgagctgctggcttcttcggagctggaggccacagcggagagggtggagcacgtgagccgcctgctgtggcggctgcccgcgccggtgctggtggttctgcgctacctcttcaccttcctcaaccacctggcccagtacagcgatgagaacatgatggacccctacaacctggccgtgtgcttcgggcccacgctgctaccggtgcccgctgggcaggacccggtggcgctgcagggccgggtgaaccagctggtgcagacgctcatagtgcagcccgatcgggtcttcccgcccctgacctcgctgcctggccccgtctacgagaagtgcatggcaccgccttccgccagctgcctgggggacgcccagctggagagcctgggggcggacaatgagccggagctggaagccgagatgcccgcacaggaggatgacctggagggggtcgtggaggctgtggcctgctttgcctacacgggccgcacagcccaggagctgagcttccggcggggggacgtactgcggctgcacgagagggcctcgagcgactggtggcggggggagcacaacggcatgcggggcctcatcccccacaagtatatcacgctgcccgccgggacggagaagcaggtggtgggcgcagggctgcagactgcaggggagtctgggagcagtcccgagggcctcctggcatcggagctggtccaccggccagagccatgcacctcacctgaggccatgggaccctctggacacagacgacgctgcttggtcccagcctccccagagcaacacgtggaggtggataaggctgtggcacagaacatggactctgtgtttaaggagctcttgggaaagacctctgtccgccagggccttgggccagcatctaccacctctcccagtcctgggccccgaagcccaaaggccccgcccagcagccgcctgggcaggaacaaaggcttctcccggggccctggggccccagcctcaccctcagcttcccacccccagggcctagacacgacccccaagccacactgaggtgccgctgctggagatgcgtgcccccggcggctacccgctggaccggccactctccccagcccccttgcttctctccagccctgtccagcaagtgcagggtgcctgcacttcaccctgtgcagagaggtgggatggggccgtgcacacagggatgcccgctccacatcctgcctgcccctcagccctggcccaggccccttttggaggcagctgaggaaggatgctggggaaagccctcttctgcagctttgtggaaggctgatcagtggctgctgggtggcgggtacccttgctcagatgcctggcagggctgggtggcgattcataaagacctcgtgttgattccccg

SEQ ID NO: 109 - DNA, 2380 bp, Homo sapiens
gaggaggagggaaaaggcgagcaaaaaggaagagtgggaggaggaggggaagcggcgaaggaggaagaggaggaggaggaagaggggagcacaaaggatccaggtctcccgacgggaggttaataccaagaaccatgtgtgccgagcggctgggccagttcatgaccctggctttggtgttggccacctttgacccggcgcgggggaccgacgccaccaacccacccgagggtccccaagacaggagctcccagcagaaaggccgcctgtccctgcagaatacagcggagatccagcactgtttggtcaacgctggcgatgtggggtgtggcgtgtttgaatgtttcgagaacaactcttgtgagattcggggcttacatgggatttgcatgacttttctgcacaacgctggaaaatttgatgcccagggcaagtcattcatcaaagacgccttgaaatgtaaggcccacgctctgcggcacaggttcggctgcataagccggaagtgcccggccatcagggaaatggtgtcccagttgcagcgggaatgctacctcaagcacgacctgtgcgcggctgcccaggagaacacccgggtgatagtggagatgatccatttcaaggacttgctgctgcacgaaccctacgtggacctcgtgaacttgctgctgacctgtggggaggaggtgaaggaggccatcacccacagcgtgcaggttcagtgtgagcagaactggggaagcctgtgctccatcttgagcttctgcacctcggccatccagaagcctcccacggcgccccccgagcgccagccccaggtggacagaaccaagctctccagggcccaccacggggaagcaggacatcacctcccagagcccagcagtagggagactggccgaggtgccaagggtgagcgaggtagcaagagccacccaaacgcccatgcccgaggcagagtcgggggccttggggctcagggaccttccggaagcagcgagtgggaagacgaacagtctgagtattctgatatccggaggtgaaatgaaaggcctggccacgaaatctttcctccacgccgtccattttcttatctatggacattccaaaacatttaccattagagaggggggatgtcacacgcaggattctgtggggactgtggacttcatcgaggtgtgtgttcgcggaacggacaggtgagatggagacccctggggccgtggggtctcaggggtgcctggtgaattctgcacttacacgtactcaagggagcgcgcccgcgttatcctcgtacctttgtcttctttccatctgtggagtcagtgggtgtcggccgctctgttgtgggggaggtgaaccagggaggggcagggcaaggcagggcccccagagctgggccacacagtgggtgctgggcctcgccccgaagcttctggtgcagcagcctctggtgctgtctccgcggaagtcagggcggctggattccaggacaggagtgaatgtaaaaataaatatcgcttagaatgcaggagaagggtggagaggaggcaggggccgagggggtgcttggtgccaaactgaaattcagtttcttgtgtggggccttgcggttcagagctcttggcgagggtggagggaggagtgtcatttctatgtgtaatttctgagccattgtactgtctgggctgggggggacactgtccaagggagtggcccctatgagtttatattttaaccactgcttcaaatctcgatttcactttttttatttatccagttatatctacatatctgtcatctaaataaatggctttcaaacaaagcaactgggtcattaaaaccagctcaaagggggtttaaaaaaaaaaaaaccagcccatcctttgaggctgatttttcttttttttaagttctattttaaaagctatcaaacagcgacatagccatacatctgactgcctgacatggactcctgcccacttgggggaaaccttatacccagaggaaaatacacacctggggagtacatttgacaaatttcccttaggatttcgttatctcaccttgaccctcagccaagattggtaaagctgcgtcctggcgattccaggagacccagctggaaacctggcttctccatgtgaggggatgggaaaggaaagaagagaatgaagactacttagtaattcccatcaggaaatgctgaccttttacataaaatcaaggagactgctgaaaatctctaagggacaggattttccagatcctaattggaaatttagcaataaggagaggagtccaaggggacaaataaaggcagagagagagagagagagagggagaggaagaaaagagagagagaaaagagcctcgtgcc

SEQ ID NO: 110 - DNA, 13793 bp, Homo sapiens
gcccggagcgagcgagcgagagagcggcgcgggccgggccatggggtggcgggcgccgggcgcgctgctgctggcgctgctgctgcacgggcggctgctggcggtgacccatgggctgagggcatacgatggcttgtctctgcctgaggacatagagaccgtcacagcaagccaaatgcgctggacacattcgtacctttctgatgatgaggacatgctggctgacagcatctcaggagacgacctgggcagtggggacctgggcagcggggacttccagatggtttatttccgagccctggtgaatttcactcgctccatcgagtacagccctcagctggaggatgcaggctccagagagtttcgagaggtgtccgaggctgtggtagacacgctggagtcggagtacttgaaaattcccggagaccaggttgtcagtgtggtgttcatcaaggagctggatggctgggtttttgtggagctggatgtgggctcggaagggaatgcggatggggctcagattcaggagatgctgctcagggtcatctccagcggctctgtggcctcctacgtcacctctccccagggattccagttccgacgcctgggcacagtgccccagttcccaagagcctgcacggaggccgagtttgcctgccacagctacaatgagtgtgtggccctggagtatcgctgtgaccggcggcccgactgcagggacatgtctgatgagctcaattgtgaggagccagtcctgggtatcagccccacattctctctcctcgtggagacgacatctttaccgccccggccagagacaaccatcatgcgacagccaccagtcacccacgctcctcagcccctgcttcccggttccgtcaggcccctgccctgtgggccccaggaggccgcatgccgcaatgggcactgcatccccagagactacctctgcgacggacaggaggactgcgaggacggcagcgatgagctagactgtggccccccgccaccctgtgagcccaacgagttcccctgcgggaatggacattgtgccctcaagctgtggcgctgcgatggtgactttgactgtgaggaccgaactgatgaagccaactgccccaccaagcgtcctgaggaagtgtgcgggcccacacagttccgatgcgtctctaccaacatgtgcatcccagccagcttccactgtgacgaggagagcgactgtcctgaccggagcgacgagtttggctgcatgcccccccaggtggtgacacctccccgggagtccatccaggcttcccggggccagacagtgaccttcacctgcgtggccattggcgtccccgccccctttctcatcaattggaggctcaactggggccacatcccctctcagcccagggtgacagtgaccagcgagggtggccgtggcacactgatcatccgtgatgtgaaggagtcagaccagggtgcctacacctgtgaggccatgaacgcccggggcatggtgtttggcattcctgacggtgtccttgagctcgtcccacaacgagcaggcccctgccctgacggccacttctacctggagcacagcgccgcctgcctgccctgcttctgctttggcatcaccagcgtgtgccagagcacccgccgcttccgggaccagatcaggctgcgctttgaccaacccgatgacttcaagggtgtgaatgtgacaatgcctgcgcagcccggcacgccacccctctcctccacgcagctgcagatcgacccatccctgcacgagttccagctagtcgacctgtcccgccgcttcctcgtccacgactccttctgggctctgcctgaacagttcctgggcaacaaggtggactcctatggcggctccctgcgttacaacgtgcgctacgagttggcccgtggcatgctggagccagtgcagcggccggacgtggtcctcgtgggtgccgggtaccgcctcctctcccgaggccacacacccacccaacctggtgctctgaaccagcgccaggtccagttctctgaggagcactgggtccatgagtctggccggccggtgcagcgcgcggagctgctgcaggtgctgcagagcctggaggccgtgctcatccagaccgtgtacaacaccaagatggctagcgtgggacttagcgacatcgccatggataccaccgtcacccatgccaccagccatggccgtgcccacagtgtggaggagtgcagatgccccattggctattctggcttgtcctgcgagagctgtgatgcccacttcactcgggtgcctggtgggccctacctgggcacctgctctggttgcagttgcaatggccatgccagctcctgtgaccctgtgtatggccactgcctgaattgccagcacaacacggaggggccacagtgcaagaagtgcaaggctggcttctttggggacgccatgaaggccacggccacttcctgccggccctgcccttgcccatacatcgatgcctcccgcagattctcagacacttgcttcctggacacggatggccaagccacatgtgacgcctgtgccccaggctacactggccgccgctgtgagagctgtgcccccggatacgagggcaaccccatccagcccggcgggaagtgcaggcccgtcaaccaggagattgtgcgctgtgacgagcgtggcagcatggggacctccggggaggcctgccgctgtaagaacaatgtggtggggcgcttgtgcaatgaatgtgctgaccgctctttccacctgagtacccgaaaccccgatggctgcctcaagtgcttctgcatgggtgtcagtcgccactgcaccagctcttcatggagccgtgcccagttgcatggggcctctgaggagcctggtcacttcagcctgaccaacgccgcaagcacccacaccaccaacgagggcatcttctcccccacgcccggggaactgggattctcctccttccacagactcttatctggaccctacttctggagcctcccttcacgcttcctgggggacaaggtgacctcctatggaggagagctgcgcttcacagtgacccagaggtcccagccgggctccacacccctgcacgggcagccgttggtggtgctgcaaggtaacaacatcatcctagagcaccatgtggcccaggagcccagccccggccagcccagcaccttcattgtgcctttccgggagcaagcatggcagcggcccgatgggcagccagccacacgggagcacctgctgatggcactggcaggcatcgacaccctcctgatccgagcatcctacgcccagcagcccgctgagagcagggtctctggcatcagcatggacgtggctgtgcccgaggaaaccggccaggaccccgcgctggaagtggaacagtgctcctgcccacccgggtaccgtgggccgtcctgccaggactgtgacacaggctacacacgcacgcccagtggcctctacctgggtacctgtgaacgctgcagctgccatggccactcagaggcctgcgagccagaaacaggtgcctgccagggctgccagcatcacacggagggccctcggtgtgagcagtgccagccaggatactacggggacgcccagcgggggacaccacaggactgccagctgtgcccctgctacggagaccctgctgccggccaggctgcccacacttgttttctggacacagacggccaccccacctgtgatgcgtgctccccaggccacagtgggcgtcactgtgagaggtgcgcccctggctactatggcaaccccagccagggccagccatgccagagagacagccaggtgccagggcccataggctgcaactgtgacccccaaggcagcgtcagcagccagtgtgatgctgctggtcagtgccagtgcaaggcccaggtggaaggcctcacttgcagccactgccggccccaccacttccacctgagtgccagcaacccagacggctgcctgccctgcttctgtatgggcatcacccagcagtgcgccagctctgcctacacacgccacctgatctccacccactttgcccctggggacttccaaggctttgccctggtgaacccacagcgaaacagccgcctgacaggagaattcactgtggaacccgtgcccgagggtgcccagctctcttttggcaactttgcccaactcggccatgagtccttctactggcagctgccggagacataccagggagacaaggtggcggcctacggtgggaagttgcgatacaccctctcctacacagcaggcccacagggcagcccactctctgaccccgatgtgcagatcacgggcaacaacatcatgctagtggcctcccagccagcgctgcagggccctgagaggaggagctacgagatcatgttccgagaggaattctggcgccggcccgatgggcagccggccacacgcgagcacctcctgatggcactggccgacctggatgagctcctgatccgggccacgttctcctccgtgccgctggtggccagcatcagcgcagtcagcctggaggtcgcccagccggggccctcaaacagaccccgcgccctcgaggtggaggagtgccgctgcccgccaggctacatcggtctgtcctgccaggactgtgcccccggctacacgcgcaccgggagtgggctctacctcggccactgcgagctatgtgaatgcaatggccactcagacctgtgccacccagagactggggcctgctcgcaatgccagcacaacgccgcaggggagttctgcgagctttgtgcccctggctactacggagatgccacagccgggacgcctgaggactgccagccctgtgcctgcccactgaccaacccagagaacatgttttcccgcacctgtgagagcctgggagccggcgggtaccgctgcacggcctgcgaacccggctacactggccagtactgtgagcagtgtggcccaggttacgtgggtaaccccagtgtgcaagggggccagtgcctgccagagacaaaccaagccccactggtggtcgaggtccatcctgctcgaagcatagtgccccaaggtggctcccactccctgcggtgtcaggtcagtgggaggggaccccactacttctattggtcccgtgaggatgggcggcctgtgcccagcggcacccagcagcgacatcaaggctccgagctccacttccccagcgtccagccctcggatgctggggtctacatttgcacctgccgtaatctccaccgatccaataccagccgggcagagctgctggtcactgaggctccaagcaagcccatcacagtgactgtggaggagcagcggagccagagcgtgcgccccggagctgacgtcaccttcatctgcacagccaaaagcaagtccccagcctataccctggtgtggacccgcctgcacaacgggaaactgcccacccgagccatggatttcaatggcatcctgaccattcgcaacgtccagctgagtgatgcaggcacctacgtgtgcaccggctccaacatgtttgccatggaccagggcacagccactctacatgtgcaggcctcgggcaccttgtccgcccccgtggtctccatccatccgccacagctcacagtgcagcccgggcaactggcggagttccgctgcagcgccacagggagccccacgcccaccctcgagtggacagggggccccggcggccagctccctgcgaaggcacaaatccacggcggcatcctgcgcctgccagctgtcgagcccacggatcaggcccagtacttgtgccgagcccacagcagcgctgggcagcaggtggccagggctgtgctccacgtgcatgggggcggtgggcccagagtccaagtgagcccagagaggacccaggtccacgcaggccgcaccgtcaggctgtactgcagggctgcaggcgtgcctagcgccaccatcacctggaggaaggaagggggcagcctcccaccacaggcccggtcagagcgcacagacatcgcgacactgctcatcccagccatcacgactgctgacgccggcttctacctctgcgtggccaccagccctgcaggcactgcccaggcccggatccaagtggttgtcctttcagcctcagatgccagccaaccgccggtcaagattgagtcctcatcgccttctgtgacagaagggcaaacactcgacctcaactgtgtggtggcagggtcagcccatgcccaggtcacctggtacaggcgagggggtagcctgcctcaccacacccaggtgcacggctcccgtctgcggctcccccaggtctcaccagctgattctggagagtatgtgtgccgtgtggagaatggatcgggccccaaggaggcctccattactgtgtctgtgctccacggcacccattctggccccagctacaccccagtgcccggcagcacccggcccatccgcatcgagccctcctcctcacacgtggcggaagggcagaccctggatctgaactgcgtggtgcccgggcaggcccacgcccaggtcacgtggcacaagcgtgggggcagcctccctgcccggcaccagacccacggctcgctgctgcggctgcaccaggtgaccccggccgactcaggcgagtatgtgtgccatgtggtgggcacctccggccccctagaggcctcagtcctggtcaccatcgaagcctctgtcatccctggacccatcccacctgtcaggatcgagtcttcatcctccacagtggccgagggccagaccctggatctgagctgcgtggtggcagggcaggcccacgcccaggtcacatggtacaagcgtgggggcagcctccctgcccggcaccaggttcgtggctcccgcctgtacatcttccaggcctcacctgccgatgcgggacagtacgtctgccgggccagcaacggcatggaggcctccatcacggtcacagtaactgggacccagggggccaacttagcctaccctgccggcagcacccagcccatccgcatcgagccctcctcctcgcaagtggcggaagggcagaccctggatctgaactgcgtggtgcccgggcagtcccatgcccaggtcacgtggcacaagcgtgggggcagcctccctgtccggcaccagacccacggctccctgctgagactctaccaagcgtcccccgccgactcgggcgagtacgtgtgccgagtgttgggcagctccgtgcctctagaggcctctgtcctggtcaccattgagcctgcgggctcagtgcctgcacttggggtcacccccacggtccggatcgagtcatcgtcttcgcaagtggcagaggggcagaccctggacctgaactgcctcgttgctggtcaggcccatgcccaggtcacgtggcacaagcgcgggggcagcctcccggcccggcaccaggtgcatggctcgaggctacgcctgctccaggtgaccccagctgattcaggggagtacgtgtgccgtgtggtcggcagctcaggtacccaggaagcctcagtccttgtcaccatccagcagcgccttagtggctcccactcccagggtgtggcgtaccccgtccgcatcgagtcctcctcagcctccctggccaatggacacaccctggacctcaactgcctggttgccagccaggctccccacaccatcacctggtataagcgtggaggcagcttacccagccggcaccagatcgtgggctcccggctgcggatccctcaggtgactccggcagactcgggcgagtacgtgtgtcacgtcagtaacggtgcaggctcccgggagacctcgctcatcgtcaccatccagggcagcggttcctcccacgtgcccagagtctccccaccgatcaggatcgagtcgtcttcccccacggtggtggaagggcagaccttggatctgaactgcgtggtcgccaggcagccccaggctatcatcacatggtacaagcgtgggggcagccttccctcccgacaccagacccatggctcccacctgcggttgcaccaaatgtctgtggctgactcgggcgagtatgtgtgccgggccaacaacaacatcgatgccctggaggcctcaatcgtcatctccgtctcccctagcgccggcagcccctccgcccctggcagctccatgcccatcagaattgagtcatcctcctcacacgtggccgaaggggagaccctggatctgaactgcgtggtccccgggcaggcccatgcccaggtcacttggcacaagcgtgggggcagcctccccagttaccatcagacccgcggctcacggctgcggctgcaccatgtgtccccggccgactcgggtgaatacgtgtgccgggtgatgggcagctctggccccctggaggcctcagtcctcgtcaccatcgaagcctctggctcaagtgctgtccacgtccccgccccaggtggagccccacccatccgcatcgagccctcctcctcccgagtggcagaagggcagaccctggatctgaagtgcgtggtgcccgggcaggcccacgcccaggtcacgtggcacaagcgtggaggaaacctccctgcccggcaccaggtccacggcccactgctgaggctgaaccaggtgtccccggctgactctggcgagtactcgtgccaagtgaccggaagctcaggcaccctggaggcatctgtcctggtcacaattgagccctccagcccaggacccattcctgctccaggactggcccagcccatctacatcgaggcctcctcttcacacgtgactgaagggcagactctggatctgaactgtgtggtgcccgggcaggcccatgcccaggtcacgtggtacaagcgcgggggcagcctccccgcccggcaccagacccatggctcccagctgcggctccaccacgtctcccctgccgactcaggcgagtatgtgtgtcgtgcagccggcggcccaggccctgagcaagaagcctccttcacagtcaccgtcccgcccagtgaggggtcttcctaccgccttaggagcccggtcatctcgatcgacccgcccagcagcaccgtgcagcagggccaggatgccagcttcaagtgcctcatccatgacggggcagcccccatcagcctcgagtggaagacccggaaccaggagctggaggacaacgtccacatcagtcccaatggctccatcatcaccatcgtgggcacccggcccagcaaccacggtacctaccgctgcgtggcctccaatgcctacggtgtggcccagagtgtggtgaacctcagtgtgcacgggccccctacagtgtccgtgctccccgagggccccgtgtgggtgaaagtgggaaaggccgtcaccctggagtgtgtcagtgccggggagccccgctcctctgctcgttggacccggatcagcagcacccctgccaagttggagcagcggacatatgggctcatggacagccacacggtgctgcagatttcatcagctaaaccatcagatgcgggcacttatgtgtgccttgctcagaatgcactaggcacagcacagaagcaggtggaggtgatcgtggacacgggcgccatggccccaggggcccctcaggtccaagctgaagaagctgagctgactgtggaggctggacacacggccaccttgcgctgctcagccacaggcagccccgcgcgcaccatccactggtccaagctgcgttccccactgccctggcagcaccggctggaaggtgacacactcatcataccccgggtagcccagcaggactcgggccagtacatctgcaatgccactagccctgccgggcacgctgaggccaccatcatcctgcacgtggagagcccaccatatgccaccacggtcccagagcacgcttcggtgcaggcaggggagacggtgcagctccagtgcctggctcacgggacacccccactcaccttccagtggagccgcgtgggcagcagccttcctgggagggcgaccgccaggaacgagctgctgcactttgagcgtgcagcccctgaggactcaggccgctaccgctgccgggtcaccaacaaggtgggctcagccgaggcctttgcccagctgctcgtccaaggccctcccggctctctccctgccacctccatcccagcagggtccacgcccaccgtgcaggtcacgcctcagctagagaccaagagcattggggccagcgttgagttccattgtgctgtgcccagcgaccggggtacccagctccgttggttcaaggaagggggtcagctgcctcccggtcacagcgtgcaggatggggtgctccgaatccagaacttggaccagagctgccaagggacgtatatatgccaggcccatggaccttgggggaaggcccaggccagtgcccagctggttatccaagccctgccctcggtgctcatcaacatccggacctctgtgcagaccgtggtggttggccacgccgtggagttcgaatgcctggcactgggtgaccccaagcctcaggtgacatggagcaaagttggagggcacctgcggccaggcattgtgcagagcggaggtgtcgtcaggatcgcccacgtagagctggctgatgcgggacagtatcgctgcactgccaccaacgcagctggcaccacacaatcccacgtcctgctgcttgtgcaagccttgccccagatctcaatgccccaagaagtccgtgtgcctgctggttctgcagctgtcttcccctgcatagcctcaggctaccccactcctgacatcagctggagcaagctggatggcagcctgccacctgacagccgcctggagaacaacatgctgatgctgccctcagtccaaccccaggacgcaggtacctacgtctgcaccgccactaaccgccagggcaaggtcaaagcctttgcccacctgcaggtgccagagcgggtggtgccctacttcacgcagaccccctactccttcctaccgctgcccaccatcaaggatgcctacaggaagttcgagatcaagatcaccttccggcctgactcagccgatgggatgctgctgtacaatgggcagaagcgagtcccagggagccccaccaacctggccaaccggcagcccgacttcatctccttcggcctcgtggggggaaggcccgagttccggttcgatgcaggctcaggcatggccaccatccgccatcccacaccactggccctgggccatttccacaccgtgaccctgctgcgcagcctcacccagggctccctgattgtgggtgacctggccccggtcaacgggacctcccagggcaagttccagggcctggatctgaacgaggaactctacctgggtggctatcctgactatggtgccatccccaaggcggggctgagcagcggcttcataggctgtgtccgggagctgcgcatccagggcgaggagatcgtcttccatgacctcaacctcacggcgcacggcatctcccactgccccacctgtcgggaccggccctgccagaatggcggtcagtgccatgactctgagagcagcagctatgtgtgcgtctgcccagctggcttcaccgggagccgctgtgagcactcgcaggccctgcactgccatccagaggcctgtgggcccgacgccacctgtgtgaaccggcctgacggtcgaggctacacctgccgctgccacctgggccgctcggggttgcggtgtgaggaaggtgtgacagtgaccaccccctcgctgtcgggtgctggctcctacctggcactgcccgccctcaccaacacacaccacgagctacgcctggacgtggagttcaagccactcgcccctgacggggtcctgctgttcagcggggggaagagcgggcctgtggaggacttcgtgtccctggcgatggtgggcggccacctggagttccgctatgagttggggtcagggctggccgttctgcggacggccgagccgctggccctgggccgctggcaccgtgtgtctgcagagcgtctcaacaaggacggcagcctgcgggtgaatggtggacgccctgtgctgcgctcctcgcccggcaagagccagggcctcaacctgcacaccctgctctacctggggggtgtggagccttccgtgccactgtccccggccaccaacatgagcgctcacttccgcggctgtgtgggcgaggtgtcagtgaatggcaaacggctggacctcacctacagtttcctaggcagccagggcatcgggcaatgctatgacagctccccatgtgagcgccagccttgccaacatggtgccacgtgcatgcccgctggcgagtatgagttccagtgcctgtgtcgagatggaatcaaaggagacctgtgtgagcacgaggagaacccctgccagctccgtgaaccctgtctgcatgggggcacctgccagggcacccgctgcctctgcctccctggcttctctggcccacgctgccaacaaggctctggacatggcatagcagagtccgactggcatcttgaaggcagcgggggcaatgatgcccctgggcagtacggagcctatttccacgatgatggcttcctcgccttccctggccatgtcttctccaggagcctgcccgaggtgcccgagaccatcgagctggaggttcggaccagcacagccagtggcctcctgctctggcagggtgtggaggtgggagaggccggccaaggcaaggacttcatcagcctcgggcttcaagacgggcaccttgtcttcaggtaccagctgggtagtggggaggcccgcctggtctctgaggaccccatcaatgacggcgagtggcaccgggtgacagcactgcgggagggccgcagaggttccatccaagtcgacggtgaggagctggtcagcggccggtccccaggtcccaacgtggcagtcaacgccaagggcagcatctacatcggcggagcccctgacgtggccacgctgaccgggggcagattctcctcgggcatcacaggctgtgtcaagaacctggtgctgcactcggcccgacccggcgccccgcccccacagcccctggacctgcagcaccgcgcccaggccggggccaacacacgcccctgcccctcgtaggcacctgcctgccccacacggactcccgggccacgccccagcccgacaatgtcgagtatattattattaatattattatgaatttttgtaagaaaccgagcgatgccacgctttgctcgtaccgccctgggctggactggaggtgggcatgccaccctcacacacacagctgggcaaagccacaaggctggccagcaaggcaggttggatgggagtgggcacctcagaaagtcaccaggacttggggtcaggaacagtggctgggtgggcccagaactgcccccactgtccccctacccaccgatggagcccccagatagagctgggtggcctgtttctgcagcccttgggcagttctcactcctaggagagccaacctcggcttgtgggctggtgccccacagctacctgagacgggcatcgcaggagtctctgccacccactcaggattgggaattgtctttagtgccggctgtggagcaaaaggcagctcacccctgggcaggcggtccccatccccaccagctcgtttttcagcacccccacccacctccacccagcccctggcccc

SEQ ID NO: 111 - DNA, 3853 bp, Homo sapiens
acgcgctcacacacagagagaaaatccttctgcctgttgatttatggaaacaattatgattctgctggagaacttttcagctgagaaatagtttgtagctacagtagaaaggctcaagttgcaccaggcagacaacagacatggaattcttatatatccagctgttagcaacaaaacaaaagtcaaatagcaaacagcgtcacagcaactgaacttactacgaactgtttttatgaggatttatcaacagagttatttaaggaggaatcctgtgttgttatcaggaactaaaaggataaggctaacaatttggaaagagcaactactctttcttaaatcaatctacaattcacagataggaagaggtcaatgacctaggagtaacaatcaactcaagattcattttcattatgttattcatgaacacccggagcactacactataatgcacaaatggatactgacatggatcctgccaactttgctctacagatcatgctttcacattatctgtctagtgggtactatatctttagcttgcaatgacatgactccagagcaaatggctacaaatgtgaactgttccagccctgagcgacacacaagaagttatgattacatggaaggaggggatataagagtgagaagactcttctgtcgaacacagtggtacctgaggatcgataaaagaggcaaagtaaaagggacccaagagatgaagaataattacaatatcatggaaatcaggacagtggcagttggaattgtggcaatcaaaggggtggaaagtgaattctatcttgcaatgaacaaggaaggaaaactctatgcaaagaaagaatgcaatgaagattgtaacttcaaagaactaattctggaaaaccattacaacacatatgcatcagctaaatggacacacaacggaggggaaatgtttgttgccttaaatcaaaaggggattcctgtaagaggaaaaaaaacgaagaaagaacaaaaaacagcccactttcttcctatggcaataacttaattgcatatggtatataaagaacccagttccagcagggagatttctttaagtggactgttttctttcttctcaaaattttctttccttttattttttagtaatcaagaaaggctggaaaaactactgaaaaactgatcaagctggacttgtgcatttatgtttgttttaagacactgcattaaagaaagatttgaaaagtatacacaaaaatcagatttagtaactaaaggttgtaaaaaattgtaaaactggttgtacaatcatgatgttagtaacagtaatttttttcttaaattaatttacccttaagagtatgttagatttgattatctgataatgattatttaaatattcctatctgcttataaaatggctgctataataataataatacagatgttgttatataaggtatatcagacctacaggcttctggcaggatttgtcagataatcaagccacactaactatggaaaatgagcagcattttaaatgctttctagtgaaaaattataatctacttaaactctaatcagaaaaaaaattctcaaaaaaactattatgaaagtcaataaaatagataatttaacaaaagtacaggattagaacatgcttatacctataaataagaacaaaatttctaatgctgctcaagtggaaagggtattgctaaaaggatgtttccaaaaatcttgtatataagatagcaacagtgattgatgataatactgtacttcatcttacttgccacaaaataacattttataaatcctcaaagtaaaattgagaaatctttaagtttttttcaagtaacataatctatctttgtataattcatatttgggaatatggcttttaataatgttcttcccacaaataatcatgcttttttcctatggttacagcattaaactctattttaagttgtttttgaactttattgttttgttatttaagtttatgttatttataaaaaaaaaaccttaataagctgtatctgtttcatatgcttttaattttaaaggaataacaaaactgtctggctcaacggcaagtttccctcccttttctgactgacactaagtctagcacacagcacttgggccagcaaatcctggaagcagacaaaaataagagcctgaagcaatgcttacaatagatgtctcacacagaacaatacaaatatgtaaaaactctttcaccacatattcttgccaattaattggatcatataagtaaaatcattacaaatataagtatttacaggattttaaagttagaatatatttgaatgcatgggtagaaaatatcatattttaaaactatgtatatttaaatttagtaattttctaatctctagaaatctctgctgttcaaaaggtggcagcactgaaagttgttttcctgttagatggcaagagcacaatgcccaaaatagaagatgcagttaagaataaggggccctgaatgtcatgaaggcttgaggtcagcctacagataacaggattattacaaggatgaatttccacttcaaaagtctttcattggcagatcttggtagcactttatatgttcaccaatgggaggtcaatatttatctaatttaaaaggtatgctaaccactgtggttttaatttcaaaatatttgtcattcaagtccctttacataaatagtatttggtaatacatttatagatgagagttatatgaaaaggctaggtcaacaaaaacaatagattcatttaattttcctgtggttgacctatacgaccaggatgtagaaaactagaaagaactgcccttcctcagatatactcttgggagagagcatgaatggtattctgaactatcacctgattcaaggactttgctagctaggttttgaggtcaggcttcagtaactgtagtcttgtgagcatattgagggcagaggaggacttagtttttcatatgtgtttccttagtgcctagcagactatctgttcataatcagttttcagtgtgaattcactgaatgtttatagacaaaagaaaatacacactaaaactaatcttcattttaaaagggtaaaacatgactatacagaaatttaaatagaaatagtgtatatacatataaaatacaagctatgttaggaccaaatgctctttgtctatggagttatacttccatcaaattacatagcaatgctgaattaggcaaaaccaacatttagtggtaaatccattcctggtagtataagtcacctaaaaaagacttctagaaatatgtactttaattatttgtttttctcctatttttaaatttattatgcaaattttagaaaataaaatttgctctagttacacacctttagaattctagaatattaaaactgtaaggggcctccatccctcttactcatttgtagtctaggaaattgagattttgatacacctaaggtcacgcagctgggtagatatacagctgtcacaagagtctagatcagttagcacatgctttctactcttcgattattagtattattagctaatggtctttggcatgtttttgttttttatttctgttgagatatagcctttacatttgtacacaaatgtgactatgtcttggcaatgcacttcatacacaatgactaatctatactgtgatgatttgactcaaaaggagaaaagaaattatgtagttttcaattctgattcctattcaccttttgtttatgaatggaaagctttgtgcaaaatatacatataagcagagtaagccttttaaaaatgttctttgaaagataaaattaaatacatgagtttctaacaattaga

SEQ ID NO: 112 - DNA, 438 bp, Homo sapiens
ggcacgagggcccgtgccgccccagccgctgccgcctgcaccggacccggagccgccatgcccaagtgtcccaagtgcaacaaggaggtgtacttcgccgagagggtgacctctctgggcaaggactggcatcggccctgcctgaagtgcgagaaatgtgggaagacgctgacctctgggggccacgctgagcacgaaggcaaaccctactgcaaccacccctgctacgcagccatgtttgggcctaaaggctttgggcggggcggagccgagagccacactttcaagtaaaccaggtggtggagaccccatccttggctgcttgcagggccactgtccaggcaaatgccaggccttgtccccagatgcccagggctcccttgttgcccctaatgctctcagtaaacctgaacacttggaaaaaaaaaaaaaaaaaaa

SEQ ID NO: 113 - DNA, 2476 bp, Homo sapiens
cggccagcacaccccggcacctcctctgcggcagctgcgcctcgcaagcgcagtgccgcagcgcacgccggagtggctgtagctgcctcggcgcggctgccgccctgcgcgggctgtgggctgcgggctgcgcccccgctgctggccagctctgcacggctgcgggctctgcggcgcccggtgctctgcaacgctgcggcgggcggcatgggataacgcggccatggtgcgccgagatcgcctccgcaggatgagggagtggtgggtccaggtggggctgctggccgtgcccctgcttgctgcgtacctgcacatcccaccccctcagctctcccctgcccttcactcatggaagtcttcaggcaagtttttcacttacaagggactgcgtatcttctaccaagactctgtgggtgtggttggaagtccagagatagttgtgcttttacacggttttccaacatccagctacgactggtacaagatttggaagggtctgaccttgaggtttcatcgggtgattgcccttgatttcttaggctttggcttcagtgacaaaccgagaccacatcactattccatatttgagcaggccagcatcgtggaagcgcttttgcggcatctggggctccagaaccgcagaatcaaccttctttctcatgactatggagatattgttgctcaggagcttctctacaggtacaagcagaatcgatctggtcggcataccataaagagtctctgtctgtcaaatggaggtatctttcctgagactcaccgtccactccttctccaaaagctactcaaagatggaggtgtgctgtcacccatcctcacacgactgatgaacttctttgtattctctcgaggtctcaccccagtctttgggccgtatactcggccctctgagagtgagctgtgggacatgtgggcagggatccgcaacaatgacgggaacttagtcattgacagtctcttacagtacatcaatcagaggaagaagttcagaaggcgctgggtgggagctcttgcctctgtaactatccccattcattttatctatgggccattggatcctgtaaatccctatccagagtttttggagctgtacaggaaaacgctgccgcggtccacagtgtcgattctggatgaccacattagccactatccacagctagaggatcccatgggcttcttgaatgcatatatgggcttcatcaactccttctgagctggaaagagtagcttccctgtattacctcccctactcccttatgtgttgtgtattccacttaggaagaaatgcccaaaagaggtcctggccatcaaacataattctctcacaaagtccactttactcaaattggtgaacagtgtataggaagaagccagcaggagctctgactaaggttgacataatagtccacctcccattactttgatatctgatcaaatgtatagacttggctttgttttttgtgctattaggaaattctgatgagcattactattcactgatgcagaaagacgttcttttgcataaaagacttttttttaacactttggacttctctgaaatatttagaagtgctaatttctggcccacccccaacaggaattctatagtaaggaggaggagaaggggggctccttccctctcctcgaatgacgttatgggcacatgccttttaaaagttctttaagcaacacagagctgagtcctctttgtcatacctttggatttagtgtttcatcagctgtttttagttataaacattttgttaaaatagatattggtttaaatgatacagtattttaggtatgatttaagactatgatttacctatacattatatatattttataaagatactaaaccagcatacccttactctgccagagtagtgaagctaattaaacacgtttggtttctgaataaattgaactaaatccaaactatttcctaaaatcacaggacattaaggaccaatagcatctgtgccagagatgtactgttattagctgggaagaccaattctaacagcaaataacagtctgagactcctcatacctcagtggttagaagcatgtctctcttgagctacagtagaggggaagggattgttgtgtagtcaagtcaccatgctgaatgtacactgattcctttatgatgactgcttaactccccactgcctgtcccagagaggctttccaatgtagctcagtaattcctgttactttacagacaggaaagttccagaaactttaagaacaaactctgaaagacctatgagcaaatggtgctgaatactttttttttaaagccacatttcattgtcttagtcaaagcaggattattaagtgattatttaaaattcgtttttttaaattagcaacttcaagtataacaactttgaaactggaataagtgtttattttctattaataaaaatgaattgtgacaaaaaaaaaaccg

SEQ ID NO: 114 - DNA, 1500 bp, Homo sapiens
cggagggtggggagcggaaagcaggacgcacggctcccgcggcccgctggctgcccttcccgccagcgcaggtgtgggacgggcggcggactaggcacagagctgcgggagcaggcacagggagtgtggagcctggcggcgggacggcgggatccggtgggagccggagtcccgccgaggggggctggaggtggaggggcccggcgaggccgcgatgaagccgagcggcgaggaccaggcggcgctggcggccggcccctgggaggagtgcttccaggcggccgtgcagctggcgctgcgggcaggacagatcatcagaaaagcccttactgaggaaaaacgtgtctcaacaaaaacatcagctgcagatcttgtgacagaaacagatcaccttgtggaagatttaattatttctgagttgcgagagaggtttccttcacacaggttcattgcagaagaggccgcggcttctggggccaagtgtgtgctcacccacagcccgacgtggatcatcgaccccatcgacggcacctgcaattttgtgcacagattcccgactgtggcggttagcattggatttgctgttcgacaagagcttgaattcggagtgatttaccactgcacagaggagcggctgtacacgggccggcggggtcggggcgccttctgcaatggccagcggctccgggtctccggggagacagatctctcaaaggccttggttctgacagaaattggccccaaacgtgaccctgcgaccctgaagctgttcctgagtaacatggagcggctgctgcatgccaaggcgcatggggtccgagtgattggaagctccacattggcactctgccacctggcctcaggggccgcggatgcctattaccagtttggcctgcactgctgggatctggcggctgccacagtcatcatcagagaagcaggcggcatcgtgatagacacttcgggtggacccctcgacctcatggcttgcagagtggttgcggccagcacccgggagatggcgatgctcatagctcaggccttacagacgattaactatgggcgggatgatgagaagtgactgcggctgaggcaaagctgctcccaaggcctccctgggctgctgtgggctcctggggaggtggccctcgtggcccacgctccatgccagtggctcacgctctgctcctggctaccccagagggagttgtcacgctacagtgagtggctggccttttaaatcgacgtctctctcaccaggatttggtgtttagctgtttctctctttaatctcacgtagcctttttcaggttagtacgtgttcttctgtcagggccaaaactcaaatctcctgtgaaatacgtattgataatccaatcttgatttttccccccagaatataaatctcaggtaataaggctttagaactgctgataaagcggatcgttctcaggccctccccccggagtacttcagaatgcaataaatcaaaataatggc

SEQ ID NO: 115 - DNA, 3022 bp, Homo sapiens
cggagtcagaaaggcgaggggcgccgggaactggcgtgtgggactccagacaggagaggctgcgccttccccgcaccgggaccttcgcgacacaccagatcctcgcccctggctcgcgcgaacgcacaggatgaccaccaccctcgtgtctgccaccatcttcgacttgagcgaagttttatgcaagggtaacaagatgctcaactatagtgctcccagtgcagggggttgcctgctggacagaaaggcagtgggcacccctgctggtgggggcttccctcggaggcactcagtcaccctgcccagctccaagttccaccagaaccagctcctcagcagcctcaagggtgagccagcccccgctctgagctcgcgagacagccgcttccgagaccgctccttctcggaagggggcgagcggctgctgcccacccagaagcagcccgggggcggccaggtcaactccagccgctacaagacggagctgtgccgcccctttgaggaaaacggtgcctgtaagtacggggacaagtgccagttcgcacacggcatccacgagctccgcagcctgacccgccaccccaagtacaagacggagctgtgccgcaccttccacaccatcggcttttgcccctacgggccccgctgccacttcatccacaacgctgaagagcgccgtgccctggccggggcccgggacctctccgctgaccgtccccgcctccagcatagctttagctttgctgggtttcccagtgccgctgccaccgccgctgccaccgggctgctggacagccccacgtccatcaccccaccccctattctgagcgccgatgacctcctgggctcacctaccctgcccgatggcaccaataacccttttgccttctccagccaggagctggcaagcctctttgcccctagcatggggctgcccgggggtggctccccgaccaccttcctcttccggcccatgtccgagtcccctcacatgtttgactctccccccagccctcaggattctctctcggaccaggagggctacctgagcagctccagcagcagccacagtggctcagactccccgaccttggacaactcaagacgcctgcccatcttcagcagactttccatctcagatgactaagccagggtagggagggacctcctgcctactccagcccctaccctgcacccacatcccataccctcttctccctacccatcccattccccacaggccctacattaacaaggttaagctcaacccctttcccccagcacctcagaatgtgccctccctctccccctcataaccccacctaacataaggacaagtcaatttgtcagtagcttcttctggcttgaaaccccctccctggattttatagcccacttaccatgcataacagacaagtcccatattttgtcagtagatgcctttttttttccggcttaagccttaagtgccaaatcacaagagaaaaagcagtaacagtttacagaagcaacttagtgccttgtaatctaactttgtcactgtgactacattacctcttcagcgccagagggcacccgtgggcctcccggagcctctgcccatggcggggtggagacccggaaccagcagccccctccactggcgacacaactgcaccttccctcatttcagtctcccgcacacttattcctcctcccctcttcccggtggcacctctccacctgtacccgcccccccaccccccccacccctgccccttggaagagttgttgccagaccagggttttgggggaaacctgtcttgacattcaaaacctttttcttcccgatctgaacccctgttgactaatcttgcctgggtttgtgtaggtctgcaggaaggaaggctgaaaaagcggacgaagattttgacttaagtgggactttgtgatttaattttttcttttttttaagtggggaggaaggggaagctagatggactaggagagacttgattttggtgctaaagttccccagttcatatgtgacatctttttaaaaaaaataacaacaaaaaaaaaatgagagaaaagctaaaaaaaaaaaagtaaggggtgagcagttaatggtattcattccacatacaatatctgtgtaaaacgatttcctgtagaagtagctttaatggtttttgctctagaataccgtaggtctatccttagagcactcacgccatgctttcttccctgggttttaaacttcatataactttcagaaattggagagcaaaaattttgcttgtcactgcacatcaatataaaaaagcttatttaacttatcaaaacgtatttattgccaaactatgcttttttttgttaattttgttcatatttatcgggatgacaaatccatagaatatattcttttatgttaaattatgatcttcatattaatcttaaaattttgtgacgtgtctttttcctttttttccacagttttaatatattattcttcaacgacattttttgtaactttacacttttttggttattttattttaaaaaaatgaaaaattaatttaaaaaaatgcaaaaaactgttggattatttattttagaaattcccccctttgtgttggactgcaaattgagtttctttctctttaggcctttcacaactaggactgagaatgtatgtaaaagttctgtgacagtacagaaggaaaacaactttttatgtatagcttctaaaaggggaaaaaaaaaaaaagagaaaccctttgacttccacgtgcccatctcaagacattccactcacagatttgaggttctggattccaggtctggagttttccaatgttaatgtaaacagaactggcacacacacattaagatgaatgtaattattattcctcttgctggtcactaccgtcgctttctatttctctttctttgtgtgaatttatttaaaagaaaaaaaaactttttgtaacgactatttgcagtttaaaaatcaataaaccccgttttttcaagaaacatt

SEQ ID NO: 116 - DNA, 3636 bp, Homo sapiens
gttctgaatgatgactgacgcgggtttgggtgatacccctcacagcccctgtcattccggagtcataaggcacccgcgcgtctagccccagcgccagggcacgcgagcggcgctggagggaggaaagcttccgcctgcgggccggacaaaagtcccgcctgcccacggctttttgcccgccgctcgtgaccgagacgcctcgccgcggccagctcgctgctctcgctggcggatggtgtgtggccgccgcaggacgcccgccgtgcccgggccatgaagtagcggctgctggcggcgccgctgcccaaccgccagccccagccccgcgctgcgctgcccggtcctctcccggcggggtcgtatcggcgtggacatggctggccgcgtccctagcctgctagttctccttgtttttccaagcagctgtttggctttccgaagcccactttctgtctttaagaggtttaaagaaactaccagaccattttccaatgaatgtcttggtaccaccagacccgtagttcctattgattcatcagattttgcattggatattcgcatgcctggggttacacctaaacagtccgatacatacttctgcatgtctatgcgaataccagtggatgaggaagccttcgtgattgacttcaagcctcgagccagcatggatactgtccatcacatgttactttttggatgcaatatgccttcatccactggaagttactggttttgtgatgaaggaacctgtacagataaagccaatattctgtatgcctgggcgagaaatgctccccctacccggctccccaaaggtgttggattcagagttggaggagagactggaagtaaatactttgtactacaggtacactatggggatattagtgcttttagagataataacaaggactgttctggtgtgtccttacacctcacacgtctgccacagcctttaattgctggcatgtaccttatgatgtctgttgacactgttatcccagcaggagaaaaagtggtgaattctgacatttcatgccattataaaaattatccaatgcatgtctttgcctatagagttcacactcaccatttaggtaaggtagtaagtggatacagagtaagaaatggacagtggacactgattggacggcagagccctcagctgccacaggctttctaccctgtggggcatccagttgatgtaagttttggtgacctactggctgcaagatgtgtattcactggtgaaggaaggacagaagccacacacattggtggcacgtctagtgatgaaatgtgcaacttatacattatgtattacatggaagccaagcatgcagtttctttcatgacctgtacccagaatgtagctccagatatgttcagaaccataccaccagaggccaacattccaattcccgtgaagtctgatatggttatgatgcatgaacatcataaagaaacagaatataaagataagattcctttactacagcagccaaaacgagaagaagaagaagtgttagaccaggatttccacatggaagaggcactggattggcctggagtatacttgttaccaggccaggtttctggggtggctctagaccctaagaataacctggtgattttccacagaggtgaccatgtctgggatggaaactcgtttgacagcaagtttgtttaccagcaaataggactcggaccaattgaagaagacactattcttgtcatagatccaaataatgctgcagtactccagtccagtggaaaaaatctgttttacttgccacatggcttgagtatagataaagatgggaattattgggtcacagacgtggctctccatcaggtgttcaaactggatccaaacaataaagaaggccctgtattaatcctgggaaggagcatgcaaccaggcagtgaccagaatcacttctgtcaacccactgatgtggctgtggatccaggcactggagccatttatgtatcagatggttactgcaacagcaggattgtgcagttttcaccaagtggaaagttcatcacacagtggggagaagagtcttcagggagcagtcctctgccaggccagttcactgttcctcacagcttggctcttgtgcctcttttgggccaattatgtgtggcagaccgggaaaatggtcggatccagtgttttaaaactgacaccaaagaatttgtgagagagattaagcattcatcatttggaagaaatgtatttgcaatttcatatataccaggcttgctctttgcagtgaatgggaagcctcattttggggaccaagaacctgtacaaggatttgtgatgaacttttccaatggggaaattatagacatcttcaagccagtgcgcaagcactttgatatgcctcatgatattgttgcatctgaagatgggactgtgtacattggagatgctcataccaacaccgtgtggaagttcaccttgactgagaaattggaacatcgatcagttaaaaaggctggcattgaggtccaggaaatcaaagaagccgaggcagttgttgaaaccaaaatggagaacaaacccacctcctcagaattgcagaagatgcaagagaaacagaaactgatcaaagagccaggctcgggagtgcctgttgttctcattacaacccttctggttattccggtggttgtcctgctggccattgccatatttattcggtggaaaaaatcaagggcctttggagattctgaacacaaactcgagacgagttcaggaagagtactgggaagatttagaggaaagggaagtggaggcttaaaccttggtaatttctttgcaagccgtaagggctacagtcgaaaagggtttgaccggcttagcactgagggcagtgaccaagagaaagaggatgatggaagtgaatcagaagaggagtattcagcacctctgcctgcgctcgcaccttcctcctcctgaaaaccaagctttgatttagattgagtaagatttacccagaatgtcagattcctttccctttagcacgtttaaagttctgtgtatttaattgtaaactgtactagtctgtgtgggactgtacacactttatttacttcgttttggttaagttggcttctgtttctagttgaggagtttcctaaaagttcataacagtgccattgtctttatatgaacatagactagagaaaccgtcctctttttccatcataattctaatctaacaatggaagatttgcccatttacacttttgagactttttggtggatgtaaataaccccattctttgcttgaacacagtattttcccaatagcactttcattgccagtgtctttctttggtgcctttcctgttcagcattcttagcctgtggcagtaaagagaaactttgtgctacatgacgacaaagctgctaaatctcctatttttttaaaatcactaacattatattgcaatgaaggaaataaaaaagtctctatttaaattcttttttaaattttcttcagttggtgtgtttttgggatgtcttatttttagatggttacactgttagaacactattttcagaatctgaatgtaatttgtgtaataaagtgttttcagagcaaaaaaaaaaaaaaa

SEQ ID NO: 117 - DNA, 4770 bp, Homo sapiens
ctcctgcatgtctgagcaaagaaaggcctttacacagcatcaccctgtgccatcccatgcaccgtgggactcagctaaaggactgtgcaaagagggggctcctgagttggatttaggcaaaaggggcagaattcgtttgatttttagagaaaatctctggagagtttcttttgattcatagaattccttttagatttctttccagcataccaactagctttagtagtgctgctacaaccagctcttataagtaagagtgaaaaagtattcttttcttctttaaaaaataagtttttcttgcttatagttaattctagaaaggcaatactaaaggtatatatttttttcaaaatgctattttttactgcacttgataattatcctgacagctctgatctctgtaatagattcactcttcagctctgggcagaaccagaggcagggttcacaccaaatttgtaaataccatatgtgggtctggtgtccaggaacttttttctttctgttaaaaaaaagaaaaaaaaaagaaaaaaaaaaagaagtagaggtggaagaaagacaagacttagaggaacaaaagaatgttttcttttgagatactcttctcaaagaaatagcaacaattgtataaacaggaaaaccagccagctttcatgataaaaggaaggcgtgtctcttgccctggtatgagattaacagaaatacagatgcatttttattttgattgaaagatggtgagaatgtagaaatgcttaggactagatttttaattttttaaaataactattatcatttattatgaaatatttgttcagttgttttgagtgggtttcttgttccttttttcatttaaaaccttctttgttgactggctccaggcttgtttgcctaaattcttaggtagtttacacaagttctagaatcttttagaactttaactccattggaagcaaacctaactaatcggagtttgagatcctggttggtttcaataggtattctggaattctggcagaacacctaaagattttttttttttttagaaggttttagatacattatcttacacaaactgtgacctaatggcaataattacctcaaatgtgggcattcatcctggttttagccttttttgaaatcatgtagccagcttgatcttggaatttaaagactatgaattctctgtgggctgaaaataatgattacttcatacccccggtcatcgttgcttaagtgaattctgaaaatagctcatctttacaacaaaaattaaaccaaggaagagattattctttgtgtgttgtactcaaatgcgatgttcaaatgcacatgttaagtatatatgtttttagctactgtaaaatgctgttagccttctaagctatcaaaacagtcacattttaaatgagtaaactaaacaattgactgtggatacttaagcatatttctggctacgttttatagttaaagtgttttatagtttacatttagactggtactttttaaagaaaagttctgtttataactgacatccgcaaaccccagtgaatgcctcttagttggaggttgtgtctcccccaaggcaagtgtgttgtcccagactcttctgtagtccagcatgcgcacttccctctggattattactttccacgtgaactcaagagaacatgaaaggcaatccagatggagggaaaaggtgtgagtccgcagcccgggccagatgcgaaggtctcatgcgtgtcgtctaaacacttgtcttcaaggccttctctctgacatcttggaagagtcattgagaacagataacctggttcattgatttttgtcttgatttgaatatttaacttattaatagatccactgatttccaggcaccaggcagtagaagagactgggattcaggtgaccatgaaggcacagctgctacttctgggccgggggtgatattttggtcagcgttttgtaggggaggaccatatacccctattcccatggtcgctggctgggttttccatatatctgctgtcatttattcgttttccccttaaaagcaaaatcaatgtaaaaggctatgtttacgttttactcattgtccagcttagactcaaagtctagttcggtgggagggggaccttagcatcctctcagagatggtcagggctgagcaggaggaggcagagacagaggggcagctcagcctggtccattgagacccactctaaacagacatcatatttggaacaagaagatgcttcgagacaggaatgggccccactgtcatgcagaaacagactgggggaatggcagtttccctgagtcttggtttcttttatgttttctcttgtgccaccaccaaactgcagaggacctgctgtgacctaaagggcattcctttagcagataagaccttgaaaactgcaaaacacctgggaccagggagcttttaaaaaatacaaaaaaataccacatttgctttttccctgtgaactgtattgacagcgtgttcttaggacagtcttttggtggaaatgttactgtaaaatagttttcatctcacccctcctaatcatactcccactttcctgtttgtgtggtggtgttgctgttttttcctttacatgaattaaccaaatgaattttgtgtcattgtttttggggcttatatttttaaaacatagaaattgccttttgttcatttgaaaagtaagtatgttgtatctgaaaaagggctctgcctctgctctccctcgcttccttgtaaccaatctccaaacgaatctctcctggcaccgcccccttccttatatagggtcactgtccccggggccacctctgcctccaccctgctgtcaccactgccctgggccaaggcacccaggactcccagaaagcgcgagagccagcaagaaggccccactcagccttgagactggtggtcacacctccctgtcagagtcgcctgctgggctgaaggggcaatggattgtcattgttgaaattgtttggctcaggttataaggaggaacttgggaagtagaaagtgacttgaccatgtgcatccttggtagcttcctgtaactaacaaatggaacagagagcacacccccgccccgccccaccccaagcagatgttcccgtcagcgctgccctgagtcagtcggtcccccgtttctgctctcctcccttttgtgttcctgctcacttcaagcttcttccatggactttccagggcacagtcatctctagcccccaaatcatctcttcatcctctgtgtgtgcatttttttaaccaaatgaaatagacaagaaagtcatactttggggcagcagaatttctaatttagtagaatcactgtatagagatagatgttgatatatatgtttgtgtatatatatcaaaccaaattggataggagaagtatagctttacagatgaggagaaggagctctttagaggtcggagtcaagactggtgtcttggacgtgcatgggctgtgtcccaggccactccgcacacatggggctgaggcgtggcgccgggcccttgtcatccacctcaccacggcagagccagcaggccctgtagggtgctgctgctgtctcactgggtcccagcttcaagcgcatcagtgggtgacgggggcaacaaatcagagtgactggaagtttccatcccgttttgctttgaccacgtgtactgagctgcagcctctgatactctgtcacgtttccaaaaatggtatccattaggatagaaagagaatggatctgcagaaatgtttacctttcaactgctcatgaattcaggacactggatagaaagactcactccccaaaatgagaacagggaagaggagacccggcgacactaagtcaccaggtccaaggaacgtggctccctccccagggtcatctcacctagatctttctctcccaggtcatctcagctcaatctcaataaccctatgaaagccctggtctgttgtgttccttcaccgtacggtttctgtaataaaaagtgttaatccatgttaatctgtgtgaaaattattgcgtgcaacagtattttctcgtgtacctctttttcctatgtgaattgtccctcttttttatttataaatgtctacttttgtttttttaaagacaaaccaatgtgttgtagacctatatgtaacctattccttagtctcatattataggtatgttataagaatggatattttacttggctttagaatgttttacaagaaaactaattcttaactgatcaagtccttgctactaaaatgcttgtgtttttcatcatgacgtcgtgtgcttctaaattaatcattttcgttgtagaaaaatggagtgaatttatattagtcttggaaactaataatagcattgtaaatttatgagatgattttaacagaaaaaatatagaagaatatagttattttaattgtaatattactaactgtagggtgagaaaaaggggggggggtcccattgtggtgaactatgttatagcttgttactcatagtttctttttgatcattttttcggtctccgaggtgaaatgacttattaattaaaatttgtaaactcacatatgcatattgtatatgtgtagaaatgtaatcacactttgtcttggaattacattaaactgtttgaaatcactgtgaaaaaaaaaaaaaaaaaaaaaaaaaaaaaaaaaaaaaaaaaaaaaaaaaaaaaaaaaaaaaaaaaaaaaaaaaaaaaaaaaaaaaaaaaaaaaaaaa

SEQ ID NO: 118 - DNA, 1671 bp, Homo sapiens
ggcacgaggcggaagagggggtgaaggccagaggctcggggcttcaagaccgctgtctggagtccccctttccaggccatgtcggggcccacctggctgcccccgaagcagccggagcccgccagagcccctcaggggagggcgatcccccgcggcaccccggggccaccaccggcccacggagcagcactccaccccagggtcaatttttgcccccttccatctgagcagtgttaccaggccccagggggaccggaggatcgggggccggcgtgggtggggtcccatggagtactccagcacacgcaggggctccctgcagacagggggggccttcgccctggaagcctggacgccgagatagacttgctgagcagcacgctggccgagctgaatgggggtcggggtcatgcgtcacggcgaccagaccgacaggcatatgagcccccgccacctcctgcctaccgcacgggctccctgaagccaaatccagcctcgccgctcccagcgtctccctatgggggccccactccagcctcttacactaccgccagcaccccggctggcccagccttccccgtgcaagtgaaggtggcacagccagtgaggggctgcggcccacccaggcggggagcctctcaggcctctgggcccctcccgggcccccactttcctctcccaggccgaggtgaagtctgggggcctggctataggagccagagagagccagggccaggggccaaagaggaagctgctgggatctctggccctgcaggaagaggaagaggaggcgagcacgggccccaggtgcccctgagccagcctccagaggatgagctggataggctgacgaagaagctggttcacgacatgaaccacccgcccagcggggagtactttggccagtgtggtggctgcggagaagatgtggttggggatggggctggggttgtggcccttgatcgcgtctttcacgtgggctgctttgtgtgttctacatgccgggcccagcttcgcggccagcatttctacgccgtggagaggagggcatattgcgagggctgctacgtggccaccctggagaaatgtgccacgtgctcccagcccatcctggaccggatcctgcgggctatggggaaggcctaccaccctggctgcttcacctgcgtggtgtgtcaccgcggcctcgacggcatccccttcacagtggatgctacgagccagatccactgcattgaggactttcacaggaagtttgccccaagatgctcagtgtgcggtggggccataatgcctgagccaggtcaggaggagactgtgagaattgttgctctggatcgaagttttcacattggctgttacaagtgcgaggagtgtgggctgctgctctcctctgagggcgagtgtcagggctgctacccgctggatgggcacatcttgtgcaaggcctgcagcgcctggcgcatccaggagctctcagccaccgtcaccactgactgctgagtcttcctagaagtacctgctgggttctcagttccagttcccatcctttgattgatcactctccctgacatccacctgtatgactttgtcaccaaatgctgtcttctctttctccaatcaagaaataataatccctcgagtttacaaaacaaaaaaaaaaaaaaaaaa

SEQ ID NO: 119 - DNA, 2047 bp, Homo sapiens
aaagctgtctttccttgtgtaagggaggaactcttgctggccggggaatctcttggaattggtcttttttggggtttcagaggcaaagcttgaacaccatcagtcaagagtggttccgcgtctccagccggaagtcgtctagccctgccgtggtggcctcctacctccacgaggtccagcctcactccccacacttcctgaagctgcttgtcaacttggccgatcgcaacgggaacacggcccttcactacagcgtgtcccactccaacttctccatcgcgaagctgctgctggagacaggcgtctgcaatgtggaccatcagaacaaagctggctacactgccgtaatgatcactcccttggcttccgcagagaccaatgaagacatggctgttgtctggaagctcttaagagaaggaaatgtgaacattcaagctactcagggaggccagactgcgctgatgctgggagtcagccacgacagggaggacatggttcaagcgctgcttagctgccaggcagatgtcaatctgcaggaccacgatggatcctcggccctcatgctggcctgtcaccatggcaacgtggacctggtgcggctgctcctggcacacccagcctgcgacagcagcctgactgacaaggctggccgcacagctttgtccatcgctctgaagtcacccacccatatggaaattgctgggcttctgagagcccacgcggagcagggcaggtccctggggctgtaggggctgcagaagaactggccgtggggaacaaaagccttcttctctggactcctccctcgcccttgaagagggcagaggccacaggccagagagccacccttctagagaagaaactatgtcaaatatgcacatacattcctgttgtataattctgctcattaggatgctttgtagtttttgccttaggccaagcctgaaaactacacgggcttcagagcagggttcaaggtgcaaggtgaggggtacgtcggtgtcatccaaacatccaaaacatcttcagccttgaattcctcatgactctaccctctgtaacattgtgtagcaagcaggcaggcaggagcacattagcacattagaaaagcaatactttttacatggaattttacagtgcactatctttctgttttttaagcaagtgtatacaaatatgtcccattgatatgcatgtctatagatgggaggggatttaagccaaccccctggcaagcattctgtaggggaccctagaagaatcaccgtgcagactggtgaaactgaacaagcaccatttgggagctttgtttcgatggggttgacagagaaatcttaaaatctgacagggtagaagaagcactttggcatcaatgccatatgtacagtcttgactatttctgagtcatctagtggctccaatttgctccagggaaattggaattaattaagaaatttattatctagtaagttgctatgtaataaagaaaaaaaagaaattcaatccaatgacacacaccacatgtatttgggcagagtcagattctctcagctattttgagtctgtggaagaaacaaaaaaaagcttcctcctgaggatgggttattgtcatcaagaagccacctgcatagccgtatccattacctcatggtaattcccggtgctttcccctcatatcccctagaagcaaatatctgttctgaggttttttgggacttctggctgcaataggagcaagggacccaggcagggcagagcaataccttccgaagcttccatattccctggggccagcacatgcaaggtttatatggtcagtagctcacgtgaagtcatctgaatctttcttaaatctgctctcttaaaatctcttatgcaaaaaaaaaaaaaaaaagccccttatataaaaagaagtaatgtcaaagtttgatgagctttacattggaaactcaaaagcttgcactctcattttggctcagatgccaatttgctgggtgcccctgtggtgagtcatgaaacctccttgggccgcaatttcatcatctct

SEQ ID NO: 120 - DNA, 4632 bp, Homo sapiens
  misc_feature (194)..(194): N may be C, G, T or A
ccgtgctcacagctcaacaacgcggggccttggcgcgcggggcgcttccccgggtcgccgtcatggccgcggaggtggcacgcccgagcggcctcgcctgagctccgggggtcgtcgccccgcagggattgctgtcacgtctaatgtggctgctgcctcgtgtcacatctgaaactcatctgtacctcacttanaaagtggttctgattagacaagacttttcgttgcagtcgacagaaacctaatgggaccattgaagaattccaaacaggcaagtgacaggaacatatttgcatgttagaagaatcagcctggcagcagcattgtgattagaatgaaggggaaccgtccaaaaacagactggggaaccaatatggatctgcctctagcatgcggaaatatctctctacactgacctaactgactcactaagcttgtggtttgtttaaaggaagccacatgaaaattgagtttgggccaatagagtgaactcgttctccattctctagcatccctccccatgcaaccaccctatccctgccaagtttctgggcaccacagattggaaagtagcctcctgtaggtatttgcccatgttaagtggtggggtctctttctgtcttcccttcttggtctcacctgtctggtgtgacaagggaagcatgtgccaaccaaggctagacccttgtgagaccagagcagccccactttcggtaaagcaagcaacctctgcttacttgcccaacacaccctagcttccgtgttccttgccttgtgagttatcttcttgggtacaatttaacacagcgttcccacctccttataactaaaatagctagagggggctttgtgcctcaaaccccaaggagaccatcttggcaatctctgcctctgcaacagggcacttgctccctgggcaactcctttcccaggtcatcttctcccttgacatgcccatcagatttaatagtgtgcctatttggcagaaaaatggggtcccttggttgctgattcttaggaatgtgaggttctcccagccagagctctcagcactaaaagttctagtctctgcgtaatggccggcatatctttggcgtatctaaaatcctcttcagtttccagcagggtctttataagcttcttctgaaggtctcagacattcagccacggaactcaagtggaatttgtttggataacgtgactgatttcaaagcccggacccttagacgtgcccatttggtgctgcaagtactgaacattactacaacatcttacagtcaacaaatttgacacattaaagatttatatcctttcttttgggttaggatcttctctcccctaaagcatctcagtttccagcatgcaatcatttccatcttatggaaatcagccatcccgctccgtgccagcatgctaccctgggaggcacatccaggcttgggaaacgggggtgtcctggatctcatgactccagcagcaccagctgctctctttcctcttccaagtagacttccgttccccccccacttgggtgtttttgtttgttttagcaattcagagctcaagataaagaccttaaagataactttgtgtgtctctccctttctaggtatttgcataggaatcagaggagttaatcttgtttgaatcttcagacaaacttctgggaggactcggtccctgcctcgcagcagatgtttccctgtcactcagtagccaatccgggggacccaggacatgccccagctatagtgatgcagattacctttctgctcctgaatcgcacctgtgcctcagactttctcccctcagcttgagactgcatgtaaactgggatgtgtgaaagcaggaagcaaagctagtgacagctgagaggtccatgtctgggtagaaccaggcccacgatgctgcctctcccgtgttctggagttcagctgcagggattctgctgatgtgcccagcaccatcgttctgtttgtgcttaaatggcacagcatttggtcagcacatctgaaaaggaaggtgtgagaagcaaagcccatggccacgttcccctgccagttatgtggcaagacgttcctcaccctggagaagttcacgattcacaattattcccactccagggagcggccgtacaagtgtgtgcagcctgactgtggcaaagcctttgtttccagatataaattgatgaggcatatggctacccattctccccagaaatctcaccagtgtgctcactgtgagaagacgttcaaccggaaagaccacctgaaaaaccacttccagacccacgaccccaacaaaatggcctttgggtgtgaggagtgtgggaagaagtacaacaccatgctgggctataagaggcacctggccctccatgcggccagcagtggggacctcacctgtggggtctgtgccctggagctagggagcaccgaggtgctactggaccacctcaaagcccatgcggaagagaagccccctagcggaaccaaggaaaagaagcaccagtgcgaccactgtgaaagatgcttctacacccggaaggatgtgcgacgccacctggtggtccacacaggatgcaaggacttcctgtgccagttctgtgcccagagatttgggcgcaaggatcacctcacccggcataccaagaagacccactcacaggagctgatgaaagagagcttgcagaccggagaccttctgagcaccttccacaccatctcgccttcattccaactgaaggctgctgccttgcctcctttccctttaggagcttctgcccagaacgggcttgcaagtagcttgccagctgaggtccatagcctcaccctcagtcccccagaacaagccgcccagcctatgcagccgctgccagagtccctggcctccctccacccctcggtatcccctggctctcctccgccaccccttcccaatcacaagtacaacaccacttctacctcatactccccacttgcaagcctgcccctcaaagcagatactaaaggtttttgcaatatcagtttgtttgaggacttgcctctgcaagagcctcagtcacctcaaaagctcaacccaggttttgatctggctaagggaaatgctggtaaagtaaacctgcccaaggagctgcctgcagatgctgtgaacctaacaatacctgcctctctggacctgtcccccctgttgggcttctggcagctgccccctcctgctacccaaaatacctttgggaatagcactcttgccctggggcctggggaatctttgccccacaggttaagctgtctggggcagcagcagcaagaacccccacttgccatgggcactgtgagcctgggccagctccccctgccccccatccctcatgtgttctcagctggcactggctctgccatcctgcctcatttccatcatgcattcagataattgatttttaaagggtatttttcgtattctggaagatgttttaagaagcattttaaatgtcagttacaatatgagaaagatttggaaaacgagactgggactatggcttattcagtgatgactggcttgagatgataagagaattctcgaactgcatgtattgtgccaatctgtcctgagtgttcatgctttgtaccaaatttaatgaacgcgtgttctgtaatcaaactgcaaatattgtcataaccaacatccaaaatgacggctgctatatataagtgtttgtcatatggaatttaatcgtaagccatgatcataatgttaactaaataactttatgtggcactgcctagtaagggaactatggaaaggtttggatttctccaaatctgggagaattttcaaaataagaaaataacctttatatgatatactatgactaggctgtgtatttcttttcagggatttttctaccttcagggttggatgtagtttagttactattaccatagccaacctgtagttttacatatacattttcttgtggagcaatagagttctccattttacagaagcattttaaatgtagtttgaatattttccacaagatgctgcaatgtgagttatcacttcatttatcttaaagaaagactaaactggttgtcagttacatctgacagaaaaaaaaaaaaaaatcactgtgtaaccagggttaagtggttaaaataatccagggcgtcagtcaaaggcattttgctgactttaatattgattatatttttaacagggaatttaaggaaaatattaccggggaattaaaaaatatatatatattaaaacaagaattttcctttgcccctgtccagcctaaacctacctacctcaaggctgcctaagttcctaagtattgtttgtaatcacccaataaataagtgcatttgtaattcatcagtcattattagcttttattaaaagaagattacgttttacaatgtaactataatctcttgaatttggtatcttattaatgagttttaaagatgtaaaacctaaccttttttaaagctccattgtcttatgtttttagaggcttttccgtaaacatatatcttacatataataaacttttcaaatcttgcaaaaaaaaaaaaaaaaaaaaaaaaaaaaaaaaaaaaaaaaaaaaaaaaaaaaaaaaaaaaa

SEQ ID NO: 121 - DNA, 2304 bp, Homo sapiens
gtccccgcagcgccgtcgcgccctcctgccgcaggccaccgaggccgccgccgtctagcgccccgacctcgccaccatgagagccctgctggcgcgcctgcttctctgcgtcctggtcgtgagcgactccaaaggcagcaatgaacttcatcaagttccatcgaactgtgactgtctaaatggaggaacatgtgtgtccaacaagtacttctccaacattcactggtgcaactgcccaaagaaattcggagggcagcactgtgaaatagataagtcaaaaacctgctatgaggggaatggtcacttttaccgaggaaaggccagcactgacaccatgggccggccctgcctgccctggaactctgccactgtccttcagcaaacgtaccatgcccacagatctgatgctcttcagctgggcctggggaaacataattactgcaggaacccagacaaccggaggcgaccctggtgctatgtgcaggtgggcctaaagccgcttgtccaagagtgcatggtgcatgactgcgcagatggaaaaaagccctcctctcctccagaagaattaaaatttcagtgtggccaaaagactctgaggccccgctttaagattattgggggagaattcaccaccatcgagaaccagccctggtttgcggccatctacaggaggcaccgggggggctctgtcacctacgtgtgtggaggcagcctcatcagcccttgctgggtgatcagcgccacacactgcttcattgattacccaaagaaggaggactacatcgtctacctgggtcgctcaaggcttaactccaacacgcaaggggagatgaagtttgaggtggaaaacctcatcctacacaaggactacagcgctgacacgcttgctcaccacaacgacattgccttgctgaagatccgttccaaggagggcaggtgtgcgcagccatcccggactatacagaccatctgcctgccctcgatgtataacgatccccagtttggcacaagctgtgagatcactggctttggaaaagagaattctaccgactatctctatccggagcagctgaaaatgactgttgtgaagctgatttcccaccgggagtgtcagcagccccactactacggctctgaagtcaccaccaaaatgctatgtgctgctgacccccaatggaaaacagattcctgccagggagactcagggggacccctcgtctgttccctccaaggccgcatgactttgactggaattgtgagctggggccgtggatgtgccctgaaggacaagccaggcgtctacacgagagtctcacacttcttaccctggatccgcagtcacaccaaggaagagaatggcctggccctctgagggtccccagggaggaaacgggcaccacccgctttcttgctggttgtcatttttgcagtagagtcatctccatcagctgtaagaagagactgggaagataggctctgcacagatggatttgcctgtggcaccaccagggtgaacgacaatagctttaccctcacggataggcctgggtgctggctgcccagaccctctggccaggatggaggggtggtcctgactcaacatgttactgaccagcaacttgtctttttctggactgaagcctgcaggagttaaaaagggcagggcatctcctgtgcatgggctcgaagggagagccagctcccccgaccggtgggcatttgtgaggcccatggttgagaaatgaataatttcccaattaggaagtgtaagcagctgaggtctcttgagggagcttagccaatgtgggagcagcggtttggggagcagagacactaacgacttcagggcagggctctgatattccatgaatgtatcaggaaatatatatgtgtgtgtatgtttgcacacttgttgtgtgggctgtgagtgtaagtgtgagtaagagctggtgtctgattgttaagtctaaatatttccttaaactgtgtggactgtgatgccacacagagtggtctttctggagaggttataggtcactcctggggcctcttgggtcccccacgtgacagtgcctgggaatgtacttattctgcagcatgacctgtgaccagcactgtctcagtttcactttcacatagatgtccctttcttggccagttatcccttccttttagcctagttcatccaatcctcactgggtggggtgaggaccactccttacactgaatatttatatttcactatttttatttatatttttgtaattttaaataaaagtgatcaataaaatgtgatttttctga

SEQ ID NO: 122 - DNA, 3442 bp, Homo sapiens
cgccgcagccgccggcgctgtggagatattctctaagccgctttcatcatgggagaaatagagcagaggccgaccccaggatcacgactgggggccccggaaaattcggggatcagtaccttggaacgtggacagaagccgcccccaacaccttcaggaaaactcgtgtccatcaaaatccagatgctggatgacacccaggaggcatttgaagttccacaaagagctcctgggaaggtgctgctggatgcagtttgcaaccacctcaacctcgtggaaggtgactattttggcctcgagtttcctgatcacaaaaagatcacggtgtggctggatctcctaaaacccattgtgaaacagattagaaggccaaagcacgttgttgttaagtttgtggtgaaattctttccgcctgaccacacacaactccaagaagaactcacaaggtacctgttcgcgctgcaggtgaagcaggacttggctcaaggcaggttgacgtgtaatgacaccagcgcagctctcttgatttcacacattgtgcaatctgagattggggattttgatgaagccttggacagagagcacttagcaaaaaataaatacatacctcagcaagacgcactagaggacaaaatcgtggaatttcaccataaccacattggacaaacaccagcagaatcagatttccagctcctagagattgcccgtcggctagagatgtatggaatccggttgcacccggccaaggacagggaaggcacgaagatcaatctggccgttgccaacacgggaattctagtgtttcagggtttcactaagatcaatgccttcaactgggccaaggtgcggaagctgagcttcaagaggaagcgctttctcatcaagctccggccagatgccaatagtgcgtaccaggataccttggaattcctgatggccagtcgggatttctgcaagtccttctggaaaatctgtgttgaacatcatgccttctttagactttttgaagagcccaaaccaaagcccaagcccgtcctctttagccgggggtcatcatttcggttcagtggtcggactcagaagcaggttctcgactatgttaaagaaggaggacataagaaggtgcagtttgaaaggaagcacagcaagattcattctatccggagccttgcttcacagcctacagaactgaattcggaagtgctggagcagtctcagcagagcaccagccttacatttggagaaggtgccgaatctccagggggccagagctgccggcgaggaaaggaaccgaaggtttccgccggggagccggggtcgcacccgagccctgcgccgaggagaagccccgcgggtaacaagcaggcggacggagccgcctcggcgcccacggaggaagaggaggaggtcgttaaggataggacccagcagagtaaacctcagcccccgcagccaagcacaggctccctgactggcagtcctcacctttccgagctgtctgtgaactcgcaggggggagtggcccctgccaacgtgaccttgtctcccaacctgagccccgacaccaagcaggcctctcccttgatcagcccgctgctgaatgaccaggcctgcccccggacggacgatgaggatgagggccggaggaagagattcccaactgataaagcgtacttcatagctaaggaagtgtctaccaccgagcgaacatatctgaaggatctcgaagttatcacttcgtggtttcagagcacagtgagcaaagaggacgccatgccggaagcactgaaaagtctcatattcccgaattttgaacctttgcacaaatttcatactaattttctcaaggaaattgagcaacgacttgccctgtgggaaggccgctcaaatgcccaaatcagagattaccaaagaatcggcgatgtcatgctgaagaacattcagggcatgaagcacctggcggctcacctgtggaagcacagcgaggccttggaggccctggagaatggaatcaagagctcccggcggctggagaacttctgcagagactttgagctgcagaaggtgtgttacctaccgctcaacaccttcctcctgcggccactgcaccggctcatgcactacaagcaggtcctggagcggctgtgcaaacaccacccgccgagccacgccgacttcagggactgccgagccgctttggcagagatcacggagatggtggcacagctccacggtacgatgatcaagatggagaatttccagaagctgcacgaactcaagaaagatttgattggcattgacaatcttgtggttccgggaagggagttcatccgtctgggcagcctcagcaagctctcggggaaggggctccagcagcgcatgttcttcctgttcaacgacgtcctgctatacacgagccgggggctgacggcctccaatcagtttaaagtccacgggcagctcccgctctatggcatgacgattgaggagagcgaagacgagtggggggtgccccactgcctgaccctccggggccagcggcagtccatcatcgtggccgccagttctcggtccgagatggagaagtgggttgaggacatccagatggccattgacctggcggagaagagcagcagccccgcccctgagttcctggccagcagcccccctgacaacaagtcccctgatgaagccaccgcggctgaccaggagtcagaggatgacctgagcgcctcgcgcacatcgctggagcgccaggccccgcaccgcggcaacacaatggtgcacgtgtgctggcaccgcaacaccagcgtctccatggtggacttcagcatcgcagtggagaatcagttgtctggaaacctgctgaggaaattcaaaaacagcaacgggtggcagaagctgtgggtggtgttcacaaacttctgcctgttcttctacaaatcacaccaggacaatcatccccttgccagcctgcctctgctcggctactcgctcaccatcccctctgagtccgagaacatccagaaagactacgtgttcaagctgcacttcaagtcccacgtctactacttcagggcggaaagcgagtacacgttcgaaaggtggatggaagtgatccgcagtgccaccagctctgcctcgcgaccccacgtgttgagccacaaagagtctcttgtgtattgatggccggacacactcgtttccgcagtggctgctttcctggaagacgtttcctttcttctgtattaatgaagcctggtaaaattaacacctgtctgaaaatcaaaaacatggcttcccagcagctctcctgtctccacagccgcgttttttaaccccgacctctcagcgtttgaatgaacagcgctcccacctccagtcctggcatccgctgggggcgctgttctttagctagtgccagtattaaaacattgtcatt

SEQ ID NO: 123 - DNA, 2311 bp, Homo sapiens
ggcacgaggggagagaccacactgccatgcctccctctgggccccgaggaaccctccttctgttgccgctgctgctgctgctcctgcttcgcgccgtgctggctgtccccctggagcgaggggcgcccaacaaggaggagacccctgcgactgagagtcccgacacaggcctgtactaccaccggtacctccaggaggtcatcgatgtactggagacggatgggcatttccgagagaagctgcaggctgccaatgcggaggacatcaagagcgggaagctgagccgagagctggactttgtcagccaccacgtccgcaccaagctggatgagctcaagcgacaggaggtgtcacggctgcggatgctgctcaaggccaagatggacgccgagcaggatcccaatgtacaggtggatcatctgaatctcctgaaacagtttgaacacctggaccctcagaaccagcatacattcgaggcccgcgacctggagctgctgatccagacggccacccgggaccttgcccagtacgacgcagcccatcatgaagagttcaagcgctacgagatgcttaaggaacacgagagacggcgttatctggagtcactgggagaggagcagagaaaggaggcggagaggaagctggaagagcaacagcgccggcaccgcgagcaccctaaagtcaacgtgcctggcagccaagcccagttgaaggaggtgtgggaggagctggatggactggaccccaacaggtttaaccccaagaccttcttcatactgcatgatatcaacagtgatggtgtcctggatgagcaggagctggaggcactcttcaccaaggagctggagaaagtgtacgacccaaagaatgaggaggacgacatgcgggagatggaggaggagcgactgcgcatgcgggagcatgtgatgaagaatgtggacaccaaccaggaccgcctcgtgaccctggaggagttcctcgcatccactcagaggaaggagtttggggacaccggggagggctgggagacagtggagatgcaccctgcctacaccgaggaagagctgaggcgctttgaagaggagctggctgcccgggaggcagagctgaatgccaaggcccagcgcctcagccaggagacagaggctctagggcggtcccagggccgcctggaggcccagaagagagagctgcagcaggctgtgctgcacatggagcagcggaagcagcagcagcagcagcagcaaggccacaaggccccggctgcccaccctgaggggcagctcaagttccacccagacacagacgatgtacctgtcccagctccagccggtgaccagaaggaggtggacacttcagaaaagaaacttctcgagcggctccctgaggttgaggtgccccagcatctgtgatcctccgggaccccagccctcaggattcctgatgctccaaggcgactgatgggcgctggatgaagtggcacagtcagcttccctgggggccggtgtcatgttgggctcctggggcgggggcacggcctggcatttcacgcattgctgccaccccaggtccacctgtctccactttcacagcctccaagtctgtggctcttcccttctgtcctccgaggggcttgccttctctcgtgtccagtgaggtgctcagtgatcggcttaacttagagaagcccgccccctccccttctccgtctgtcccaagagggtctgctctgagcctgcgttcctaggtggctcggcctcagctgcctgggttgtggccgccctagcatcctgtatgcccacagctactggaatccccgctgctgctccgggccaagcttctggttgattaatgagggcatggggtggtccctcaagaccttcccctaccttttgtggaaccagtgatgcctcaaagacagtgtcccctccacagctgggtgccaggggcaggggatcctcagtatagccggtgaaccctgataccaggagcctgggcctccctgaacccctggcttccagccatctcatcgccagcctcctcctggacctcttggcccccagccccttccccacacagccccagaagggtcccagagctgaccccactccaggacctaggcccagcccctcagcctcatctggagcccctgaagaccagtcccacccacctttctggcctcatctgacactgctccgcatcctgctgtgtgtcctgttccatgttccggttccatccaaatacactttctggaacaaaaaaaaaaaaaaaaaaaaaaaaaaaaaaaaaaaaaaaaaaaaaaaaaaaaaaa

SEQ ID NO: 124 - DNA, 6633 bp, Homo sapiens
ttctccccgccccccagttgttgtcgaagtctgggggttgggactggaccccctgattgcgtaagagcaaaaagcgaaggcgcaatctggacactgggagattcggagcgcagggagtttgagagaaacttttattttgaagagaccaaggttgagggggggcttatttcctgacagctatttacttagagcaaatgattagttttagaaggatggactataacattgaatcaattacaaaacgcggtttttgagcccattactgttggagctacagggagagaaacaggaggagactgcaagagatcatttgggaaggccgtgggcacgctctttactccatgtgtgggacattcattgcggaataacatcggaggagaagtttcccagagctatggggacttcccatccggcgttcctggtcttaggctgtcttctcacagggctgagcctaatcctctgccagctttcattaccctctatccttccaaatgaaaatgaaaaggttgtgcagctgaattcatccttttctctgagatgctttggggagagtgaagtgagctggcagtaccccatgtctgaagaagagagctccgatgtggaaatcagaaatgaagaaaacaacagcggcctttttgtgacggtcttggaagtgagcagtgcctcggcggcccacacagggttgtacacttgctattacaaccacactcagacagaagagaatgagcttgaaggcaggcacatttacatctatgtgccagacccagatgtagcctttgtacctctaggaatgacggattatttagtcatcgtggaggatgatgattctgccattataccttgtcgcacaactgatcccgagactcctgtaaccttacacaacagtgagggggtggtacctgcctcctacgacagcagacagggctttaatgggaccttcactgtagggccctatatctgtgaggccaccgtcaaaggaaagaagttccagaccatcccatttaatgtttatgctttaaaagcaacatcagagctggatctagaaatggaagctcttaaaaccgtgtataagtcaggggaaacgattgtggtcacctgtgctgtttttaacaatgaggtggttgaccttcaatggacttaccctggagaagtgaaaggcaaaggcatcacaatgctggaagaaatcaaagtcccatccatcaaattggtgtacactttgacggtccccgaggccacggtgaaagacagtggagattacgaatgtgctgcccgccaggctaccagggaggtcaaagaaatgaagaaagtcactatttctgtccatgagaaaggtttcattgaaatcaaacccaccttcagccagttggaagctgtcaacctgcatgaagtcaaacattttgttgtagaggtgcgggcctacccacctcccaggatatcctggctgaaaaacaatctgactctgattgaaaatctcactgagatcaccactgatgtggaaaagattcaggaaataaggtatcgaagcaaattaaagctgatccgtgctaaggaagaagacagtggccattatactattgtagctcaaaatgaagatgctgtgaagagctatacttttgaactgttaactcaagttccttcatccattctggacttggtcgatgatcaccatggctcaactgggggacagacggtgaggtgcacagctgaaggcacgccgcttcctgatattgagtggatgatatgcaaagatattaagaaatgtaataatgaaacttcctggactattttggccaacaatgtctcaaacatcatcacggagatccactcccgagacaggagtaccgtggagggccgtgtgactttcgccaaagtggaggagaccatcgccgtgcgatgcctggctaagaatctccttggagctgagaaccgagagctgaagctggtggctcccaccctgcgttctgaactcacggtggctgctgcagtcctggtgctgttggtgattgtgatcatctcacttattgtcctggttgtcatttggaaacagaaaccgaggtatgaaattcgctggagggtcattgaatcaatcagcccggatggacatgaatatatttatgtggacccgatgcagctgccttatgactcaagatgggagtttccaagagatggactagtgcttggtcgggtcttggggtctggagcgtttgggaaggtggttgaaggaacagcctatggattaagccggtcccaacctgtcatgaaagttgcagtgaagatgctaaaacccacggccagatccagtgaaaaacaagctctcatgtctgaactgaagataatgactcacctggggccacatttgaacattgtaaacttgctgggagcctgcaccaagtcaggccccatttacatcatcacagagtattgcttctatggagatttggtcaactatttgcataagaatagggatagcttcctgagccaccacccagagaagccaaagaaagagctggatatctttggattgaaccctgctgatgaaagcacacggagctatgttattttatcttttgaaaacaatggtgactacatggacatgaagcaggctgatactacacagtatgtccccatgctagaaaggaaagaggtttctaaatattccgacatccagagatcactctatgatcgtccagcctcatataagaagaaatctatgttagactcagaagtcaaaaacctcctttcagatgataactcagaaggccttactttattggatttgttgagcttcacctatcaagttgcccgaggaatggagtttttggcttcaaaaaattgtgtccaccgtgatctggctgctcgcaacgtcctcctggcacaaggaaaaattgtgaagatctgtgactttggcctggccagagacatcatgcatgattcgaactatgtgtcgaaaggcagtacctttctgcccgtgaagtggatggctcctgagagcatctttgacaacctctacaccacactgagtgatgtctggtcttatggcattctgctctgggagatcttttcccttggtggcaccccttaccccggcatgatggtggattctactttctacaataagatcaagagtgggtaccggatggccaagcctgaccacgctaccagtgaagtctacgagatcatggtgaaatgctggaacagtgagccggagaagagaccctccttttaccacctgagtgagattgtggagaatctgctgcctggacaatataaaaagagttatgaaaaaattcacctggacttcctgaagagtgaccatcctgctgtggcacgcatgcgtgtggactcagacaatgcatacattggtgtcacctacaaaaacgaggaagacaagctgaaggactgggagggtggtctggatgagcagagactgagcgctgacagtggctacatcattcctctgcctgacattgaccctgtccctgaggaggaggacctgggcaagaggaacagacacagctcgcagacctctgaagagagtgccattgagacgggttccagcagttccaccttcatcaagagagaggacgagaccattgaagacatcgacatgatggacgacatcggcatagactcttcagacctggtggaagacagcttcctgtaactggcggattcgaggggttccttccacttctggggccacctctggatcccgttcagaaaaccactttattgcaatgcggaggttgagaggaggacttggttgatgtttaaagagaagttcccagccaagggcctcggggagcgttctaaatatgaatgaatgggatattttgaaatgaactttgtcagtgttgcctctcgcaatgcctcagtagcatctcagtggtgtgtgaagtttggagatagatggataagggaataataggccacagaaggtgaactttgtgcttcaaggacattggtgagagtccaacagacacaatttatactgcgacagaacttcagcattgtaattatgtaaataactctaaccaaggctgtgtttagattgtattaactatcttctttggacttctgaagagaccactcaatccatccatgtacttccctcttgaaacctgatgtcagctgctgttgaactttttaaagaagtgcatgaaaaaccatttttgaaccttaaaaggtactggtactatagcattttgctatcttttttagtgttaagagataaagaataataattaaccaaccttgtttaatagatttgggtcatttagaagcctgacaactcattttcatattgtaatctatgtttataatactactactgttatcagtaatgctaaatgtgtaataatgtaacatgatttccctccagagaaagcacaatttaaaacaatccttactaagtaggtgatgagtttgacagtttttgacatttatattaaataacatgtttctctataaagtatggtaatagctttagtgaattaaatttagttgagcatagagaacaaagtaaaagtagtgttgtccaggaagtcagaatttttaactgtactgaataggttccccaatccatcgtattaaaaaacaattaactgccctctgaaataatgggattagaaacaaacaaaactcttaagtcctaaaagttctcaatgtagaggcataaacctgtgctgaacataacttctcatgtatattacccaatggaaaatataatgatcagcaaaaagactggatttgcagaagttttttttttttttcttcatgcctgatgaaagctttggcaaccccaatatatgtattttttgaatctatgaacctgaaaagggtcagaaggatgcccagacatcagcctccttctttcaccccttaccccaaagagaaagagtttgaaactcgagaccataaagatattctttagtggaggctggatgtgcattagcctggatcctcagttctcaaatgtgtgtggcagccaggatgactagatcctgggtttccatccttgagattctgaagtatgaagtctgagggaaaccagagtctgtatttttctaaactccctggctgttctgatcggccagttttcggaaacactgacttaggtttcaggaagttgccatgggaaacaaataatttgaactttggaacagggttggaattcaaccacgcaggaagcctactatttaaatccttggcttcaggttagtgacatttaatgccatctagctagcaattgcgaccttaatttaactttccagtcttagctgaggctgagaaagctaaagtttggttttgacaggttttccaaaagtaaagatgctacttcccactgtatgggggagattgaactttccccgtctcccgtcttctgcctcccactccataccccgccaaggaaaggcatgtacaaaaattatgcaattcagtgttccaagtctctgtgtaaccagctcagtgttttggtggaaaaaacattttaagttttactgataatttgaggttagatgggaggatgaattgtcacatctatccacactgtcaaacaggttggtgtgggttcattggcattctttgcaatactgcttaattgctgataccatatgaatgaaacatgggctgtgattactgcaatcactgtgctatcggcagatgatgctttggaagatgcagaagcaataataaagtacttgactacctactggtgtaatctcaatgcaagccccaactttcttatccaactttttcatagtaagtgcgaagactgagccagattggccaattaaaaacgaaaacctgactaggttctgtagagccaattagacttgaaatacgtttgtgtttctagaatcacagctcaagcattctgtttatcgctcactctcccttgtacagccttattttgttggtgctttgcattttgatattgctgtgagccttgcatgacatcatgaggccggatgaaacttctcagtccagcagtttccagtcctaacaaatgctcccacctgaatttgtatatgactgcatttgtgggtgtgtgtgtgttttcagcaaattccagatttgtttccttttggcctcctgcaaagtctccagaagaaaatttgccaatctttcctactttctatttttatgatgacaatcaaagccggcctgagaaacactatttgtgactttttaaacgattagtgatgtccttaaaatgtggtctgccaatctgtacaaaatggtcctatttttgtgaagagggacataagataaaatgatgttatacatcaatatgtatatatgtatttctatatagacttggagaatactgccaaaacatttatgacaagctgtatcactgccttcgtttatatttttttaactgtgataatccccacaggcacattaactgttgcacttttgaatgtccaaaatttatattttagaaataataaaaagaaagatacttacatgttcccaaaacaatggtgtggtgaatgtgtgagaaaaactaacttgatagggtctaccaatacaaaatgtattacgaatgcccctgttcatgtttttgttttaaaacgtgtaaatgaagatctttatatttcaataaatgatatataatttaaagtt

SEQ ID NO: 125 - DNA, 4141 bp, Homo sapiens
aagaacaatgcccttaaagttgtgcgagagctacaagcccaaattgctgaacttcaggaagactttgaatccgagaaggcttcacggaacaaggccgaaaagcagaaaagggacttgagtgaggaactggaagctctgaaaacagagctggaggacacgctggacaccacggcagcccagcaggaactacgtacaaaacgtgaacaagaagtggcagagctgaagaaagctcttgaggaggaaactaagaaccatgaagctcaaatccaggacatgagacaaagacacgcaacagccctggaggagctctcagagcagctggaacaggccaagcggttcaaagcaaatctagagaagaacaagcagggcctggagacagataacaaggagctggcgtgtgaggtgaaggtcctgcagcaggtcaaggctgagtctgagcacaagaggaagaagctcgacgcgcaggtccaggagctccatgccaaggtctctgaaggcgacaggctcagggtggagctggctggagaaagcaagtaagctgcagaatgagctagataatgtctccacccttctggaagaagcagagaagaagggtattaaatttgctaaggatgcagctagtcttgagtctcaactacaggatacacaggagcttcttcaggaggagacacgccagaaactaaacctgagcagtcggatccggcagctggaagaggagaagaacagtcttcaggagcagcaggaggaggaggaggaggccaggaagaacctggagaagcaagtgctggccctgcagtcccagttggctgataccaagaagaaagtagatgacgacctgggaacaattgaaagtctggaagaagccaagaagaagcttctgaaggacgcggaggccctgagccagcgcctggaggagaaggcactggcgtatgacaaactggagaagaccaagaaccgcctgcagcaggagctggacgacctcacggtggacctggaccaccagcgccaggtcgcctccaacttggagaagaagcagaagaagtttgaccagctgttagcagaagagaagagcatctctgctcgctatgccgaagagcgggaccgggccgaagccgaggccagagagaaagaaaccaaagccctgtcactggcccgggccctcgaggaagccctggaggccaaggaggagtttgagaggcagaacaagcagctccgagcagacatggaagacctcatgagctccaaagatgatgtgggaaaaaacgttcacgaacttgaaaaatccaaacgggccctagagcagcaggtggaggaaatgaggacccagctggaggagctggaagacgaactccaggccacggaagatgccaagcttcgtctggaggtcaacatgcaggccatgaaggcgcagttcgagagagacctgcaaaccagggatgagcagaatgaagagaagaagcggctgctgatcaaacaggtgcgggagctcgaggcggagctggaggatgagaggaaacagcgggcgcttgctgtagcttcaaagaaaaagatggagatagacctgaaggacctcgaagcccaaatcgaggctgcgaacaaagctcgggatgaggtgattaagcagctccgcaagctccaggctcagatgaaggattaccaacgtgaattagaagaagctcgtgcatccagagatgagatttttgctcaatccaaagagagtgaaaagaaattgaagagtctggaagcagaaatccttcaattgcaggaggaacttgcctcatctgagcgagcccgccgacacgccgagcaggagagagatgagctggcggacgaggtcaccaacagcgcctctggcaagtccgcgctgctggatgagaagcggcgtctggaagctcggatcgcacagctggaggaggagctggaagaggagcagagcaacatggagctgctcaacgaccgcttccgcaagaccactctacaggtggacacactgaacgccgagctagcagccgagcgcagcgccgcccagaagagtgacaatgcacgccagcaactggagcggcagaacaaggagctgaaggccaagctgcaggaactcgagggtgctgtcaagtctaagttcaaggccaccatctcagccctggaggccaagattgggcagctggaggagcagcttgagcaggaagccaaggaacgagcagccgccaacaaattagtccgtcgcactgagaagaagctgaaagaaatcttcatgcaggttgaggatgagcgtcgacacgcggaccagtataaagagcagatggagaaggccaacgctcggatgaagcagcttaaacgccagctggaggaagcagaagaagaagcgacgcgtgccaacgcatctcggcgtaaactccagcgggaactggatgatgccaccgaggccaacgagggcctgagccgcgaggtcagcaccctgaagaaccggctgaggcggggtggccccatcagcttctcttccagccgatctggccggcgccagctgcaccttgaaggagcttccctggagctctccgacgatgacacagaaagtaagaccagtgatgtcaacgagacgcagccaccccagtcagagtaaagttgcaggaagccagaggaggcaatacagtgggacagttaggaatgcacccggggcctcctgcagatttcggaaattggcaagctacgggattccttcctgaaagatcaactgtgtcttaaggctctccagcctatgcatactgtatcctgcttcagacttaggtacaattgctcccctttttatatatagacacacacaggacacatatattaaacagattgtttcatcattgcatctattttccatatagtcatcaagagaccattttataaaacatggtaagaccctttttaaaacaaactccaggcccttggttgcgggtcgctgggttattggggcagcgccgtggtcgtcactcagtcgctctgcatgctctctgtcatacagacaggtaacctagttctgtgttcacgtggcccccgacgactcagccacatcaagtctcctagaccactgtggactctaaactgcacttgtctctctcatttccttcaaataatgatcaatgctatttcagtgagcaaactgtgaaaggggctttggaaagagtaggaggggtgggctggatcggaagcaacacccatttggggttaccatgtccatcccccaaggggggccctgcccctcgagtcgatggtgtcccgcatctactcatgtgaactggccttggcgagggctggtctgtgcatagaagggatagtggccacactgcagctgaggccccaggtggcagccatggatcatgtagacttccagatggtctcccgaaccgcctggctctgccggcgccctcctcacgtcaggagcaagcagccgtggacccctaagccgagctggtggaaggcccctccccgtcgccagccgggccctcatgctgaccttgcaaattcagccgctgctttgagcccaaaatgggaatattggttttgtgtccgaggcttgttccaagtttgtcaatgaggtttatggagcctccagaacagatgccatcttcctgaatgttgacatgccagtgggtgtgactccttcatttttccttctcccttccctttggacagtgttacagtgaacacttagcatcctgtttttggttggtagttaagcaaactgacattacggaaagtgccttagacactacagtactaagacaatgttgaatatatcattcgcctctataacaatttaatgtattcagttttgactgtgcttcatatcatgtacctctctagtcaaagtggtattacagacattcagtgacaatgaatcagtgttaattctaaatccttgatcctctgcaatgtgcttgaaaacacaaaccttttgggttaaaagctttaacatctattaggaagaatttgtcctgtgggtttggaatcttggattttccccctttatgaactgtactggctgttgaccaccagacacctgaccgcaaatatcttttcttgtattcccatatttctagacaatgatttttgtaagacaataaatttattcattataaaaaaaaaaaaaaaaaaa

SEQ ID NO: 126 - DNA, 501 bp, Homo sapiens
gaattcgctttggatccatttccatcggtccttacagccgctcgtcagactccagcagccaagatggtgaagcagatcgagagcaagactgcttttcaggaagccttggacgctgcaggtgataaacttgtagtagttgacttctcagccacgtggtgtgggccttgcaaaatgatcaaccctttctttcattccctctctgaaaagtattccaacgtgatattccttgaagtagatgtggatgactgtcaggatgttgcttcagagtgtgaagtcaaatgcacgccaacattccagttttttaagaagggacaaaaggtgggtgaattttctggagccaataaggaaaagcttgaagccaccattaatgaattagtctaatcatgttttctgaaaacataaccagccattggctatttaaacttgtatttttttatttacaaaatataaatatgaagacataaccagttgccatctgcgtgacaataaacattatgctaa

SEQ ID NO: 127 - DNA, 2602 bp, Homo sapiens
gccgtgtcgccaccatggctccgcaccgccccgcgcccgcgctgctttgcgcgctgtccctggcgctgtgcgcgctgtcgctgcccgtccgcgcggccactgcgtcgcggggggcgtcccaggcgggggcgccccaggggcgggtgcccgaggcgcggcccaacagcatggtggtggaacaccccgagttcctcaaggcagggaaggagcctggcctgcagatctggcgtgtggagaagttcgatctggtgcccgtgcccaccaacctttatggagacttcttcacgggcgacgcctacgtcatcctgaagacagtgcagctgaggaacggaaatctgcagtatgacctccactactggctgggcaatgagtgcagccaggatgagagcggggcggccgccatctttaccgtgcagctggatgactacctgaacggccgggccgtgcagcaccgtgaggtccagggcttcgagtcggccaccttcctaggctacttcaagtctggcctgaagtacaagaaaggaggtgtggcatcaggattcaagcacgtggtacccaacgaggtggtggtgcagagactcttccaggtcaaagggcggcgtgtggtccgtgccaccgaggtacctgtgtcctgggagagcttcaacaatggcgactgcttcatcctggacctgggcaacaacatccaccagtggtgtggttccaacagcaatcggtatgaaagactgaaggccacacaggtgtccaagggcatccgggacaacgagcggagtggccgggcccgagtgcacgtgtctgaggagggcactgagcccgaggcgatgctccaggtgctgggccccaagccggctctgcctgcaggtaccgaggacaccgccaaggaggatgcggccaaccgcaagctggccaagctctacaaggtctccaatggtgcagggaccatgtccgtctccctcgtggctgatgagaaccccttcgcccagggggccctgaagtcagaggactgcttcatcctggaccacggcaaagatgggaaaatctttgtctggaaaggcaagcaggcaaacacggaggagaggaaggctgccctcaaaacagcctctgacttcatcaccaagatggactaccccaagcagactcaggtctcggtccttcctgagggcggtgagaccccactgttcaagcagttcttcaagaactggcgggacccagaccagacagatggcctgggcttgtcctacctttccagccatatcgccaacgtggagcgggtgcccttcgacgccgccaccctgcacacctccactgccatggccgcccagcacggcatggatgacgatggcacaggccagaaacagatctggagaatcgaaggttccaacaaggtgcccgtggaccctgccacatatggacagttctatggaggcgacagctacatcattctgtacaactaccgccatggtggccgccaggggcagataatctataactggcagggtgcccagtctacccaggatgaggtcgctgcatctgccatcctgactgctcagctggatgaggagctgggaggtacccctgtccagagccgtgtggtccaaggcaaggagcccgcccacctcatgagcctgtttggtgggaagcccatgatcatctacaagggcggcacctcccgcgagggcgggcagacagcccctgccagcacccgcctcttccaggtccgcgccaacagcgctggagccacccgggctgttgaggtattgcctaaggctggtgcactgaactccaacgatgcctttgttctgaaaaccccctcagccgcctacctgtgggtgggtacaggagccagcgaggcagagaagacgggggcccaggagctgctcagggtgctgcgggcccaacctgtgcaggtggcagaaggcagcgagccagatggcttctgggaggccctgggcgggaaggctgcctaccgcacatccccacggctgaaggacaagaagatggatgcccatcctcctcgcctctttgcctgctccaacaagattggacgttttgtgatcgaagaggttcctggtgagctcatgcaggaagacctggcaacggatgacgtcatgcttctggacacctgggaccaggtctttgtctgggttggaaaggattctcaagaagaagaaaagacagaagccttgacttctgctaagcggtacatcgagacggacccagccaatcgggatcggcggacgcccatcaccgtggtgaagcaaggctttgagcctccctcctttgtgggctggttccttggctgggatgatgattactggtctgtggaccccttggacagggccatggctgagctggctgcctgaggaggggcagggcccacccatgtcaccggtcagtgccttttggaactgtccttccctcaaagaggccttagagcgagcagagcagctctgctatgagtgtgtgtgtgtgtgtgtgttgtttcttttttttttttttacagtatccaaaaatagccctgcaaaaattcagagtccttgcaaaattgtctaaaatgtcagtgtttgggaaattaaatccaataaaaacattttgaagtgtg

SEQ ID NO: 128 - DNA, 1627 bp, Homo sapiens
gcccccaccatcaaggggaagaaagtgctcttcggattccggttcgccctggcctcccgcagccgccgcgggaccggcccccagcacacccccggggcgccgggcgcggggcagccgcccggacgcgcgcgggcctcaggcgccgccgggaccccagccccccaaactttggcaagttgcgggcgccgagcgcacccggaggcgcggggcgcggccgcaggcggagccgccccctgacgccgggccgccccctcccggccccggccgccccgccggctccgcggaaagtttgcggccgcccctgcgccgcacccggggcctgggtgagactgcggcggcggcagggcgcggacggccatatttgccggcgcggcccgagccgccgacaacaaaaagtgcgcgggcgctcggcgggcgctcggacgggcgcggggctgcagcgctaccgcccggcctcgccgccgccgccgccgccctcgcggcctggccccgccgcgcccggcgcgcccgccgcccggggggatgtcttacaaaccgaacttggccgcgcacatgcccgccgccgccctcaacgccgctgggagtgtccactcgccttccaccagcatggcaacgtcttcacagtaccgccagctgctcagtgactacgggccaccgtccctaggctacacccagggaactgggaacagccaggtgccccaaagcaaatacgcggagctgctggccatcattgaagagctggggaaggagatcagacccacgtacgcagggagcaagagtgccatggagaggctgaagcgcggcatcattcacgctagaggactggttcgggagtgcttggcagaaacggaacggaatgccagatcctagctgccttgttggttttgaaggatttccatctttttacaagatgagaagttacagttcatctcccctgttcagatgaaacccttgttttcaaaatggttacagtttcgtttttcctcccatggttcacttggctctgaacctacagtctcaaagattgagaaaagattttgcagttaattaggatttgcattttaagtagttaggaactgcccaggttttttttgttttttaagcattgatttaaaagatgcacggaaagttatcttacagcaaactgtagtttgcctccaagacaccattgtctccctttaatcttctcttttgtatacatttgttacccatggtgttctttgttccttttcataagctaataccactgtagggattttgttttgaacgcatattgacagcacgctttacttagtagccggttcccatttgccatacaatgtaggttctgcttaatgtaacttcttttttgcttaagcatttgcatgactattagtgcttcaaagtcaatttttaaaaatgcacaagttataaatacagaagaaagagcaacccaccaaacctaacaaggacccccgaacactttcatactaagactgtaagtagatctcagttctgcgtttattgtaagttgataaaaacatctggaagaaaatgactaaaactgtttgcatctttgtatgtatttattacttgatgtaataaagcttattttcattaacaatttgtattaaaaaaaaaaaaaaaa

SEQ ID NO: 129 - DNA, 1887 bp, Homo sapiens
ctttttaagctcccctgagccggtgctgcgctcctctaattgggactccgagccggggctatttctggcgctggcgcggctccaagaaggcatccgcatttgctaccagcggcggccgcggcggagccaggccggtcctcagcgcccagcaccgccgctcccggcaacccggagcgcgcaccgcaggccggcggccgagctcgcgcatcccagccatcactcttccacctgctccttagagaagggaagatgagtgagtcgagctcgaagtccagccagcccttggcctccaagcaggaaaaggacggcactgagaagcggggccggggcaggccgcgcaagcagcctccgaaggagcccagcgaagtgccaacacctaagagacctcggggccgaccaaagggaagcaaaaacaagggtgctgccaagacccggaaaaccaccacaactccaggaaggaaaccaaggggcagacccaaaaaactggagaaggaggaagaggagggcatctcgcaggagtcctcggaggaggagcagtgacccatgcgtgccgcctgctcctcactggaggagcagcttccttctgggactggacagctttgctccgctcccaccgcccccgccccttccccaggcccaccatcaccaccgcctctggccgccacccccatcttccacctgtgccctcaccaccacactacacagcacaccagccgctgcagggctcccatgggctgagtggggagcagttttcccctggcctcagttcccagctccccccgcccacccacgcatacacacatgccctcctggacaaggctaacatcccacttagccgcaccctgcacctgctgcgtccccactcccttggtggtggggacattgctctctgggcttttggtttgggggcgccctctctgctccttcactgttccctctggcttcccatagtggggcctgggagggttcccctggccttaaaaggggcccaagccccatctcatcctggcacgccctactccactgccctggcagcagcaggtgtggccaatggaggggggtgctggcccccaggattcccccagccaaactgtctttgtcaccacgtggggctcacttttcatccttccccaacttccctagtccccgtactaggttggacagcccccttcggctacaggaaggcaggaggggtgagtcccctactccctcttcactgtggccacagcccccttgccctccgcctgggatctgagtacatattgtggtgatggagatgcagtcacttattgtccaggtgaggcccaagagccctgtggccgccacctgaggtgggctggggctgctcccctaaccctactttgcttccgccactcagccatttccccctcctcagatggggcaccaataacaaggagctcaccctgcccgctcccaacccccctcctgctcctccctgccccccaaggttctggttccatttttcctctgttcacaaactacctctggacagttgtgttgttttttgttcaatgttccattcttcgacatccgtcattgctgctgctaccagcgccaaatgttcatcctcattgcctcctgttctgcccacgatcccctcccccaagatactctttgtggggaagaggggctggggcatggcaggctgggtgaccgactaccccagtcccagggaaggtggggccctgcccctaggatgctgcagcagagtgagcaagggggcccgaatcgaccataaagggtgtaggggccacctcctccccctgttctgttggggaggggtagccatgatttgtcccagcctggggctccctctctggtttcctatttgcagttacttgaataaaaaaaatatccttttctgga

SEQ ID NO: 130 - DNA, 2126 bp, Homo sapiens
gtaaggccgttttcttttcccattcgctcatctgccaggaaaagggacttgccgttggcgcttcggcctcttgttcattgagaaaaaagaggaaatactccgcgtgcgcttgtagaaggggagtcgtctccagctccgaaccccggagtgttcatcagcggggaatctggctccgaattctctttttttctcccgccgattgctcggaagttggtctaaagcagaggttggaaagaaaggaaaaaagtttgcatcgagactggatttatttgcacatcgcagaaagaagagaatccaagggagaggggttggtgcaaagccgcgatcacggagttcagatgtgttctaagcctgctggagtgaccacacttccaagacctgatggaggccagagctcagagtggcaacgggtcgcagcccttgctgcagacgccccgtgacggtggcagacagcgtggggagcccgaccccagagacgccctcacccagcaggtacatgtcttgtctctggatcagatcagagccatccgaaacaccaatgagtacacagaggggcctactgtcgtcccaagacctgggctcaagcctgctcctcgcccctccactcagcacaaacacgagagactccacggtctgcctgagcaccgccagcctcctaggctccagcactcgcaggtccattcttctgcacgagcccctctgtccagatccataagcacggtcagctcagggtcgcggagcagtacgaggacaagtaccagcagcagctcctctgaacagagactgctaggatcatccttctcctccgggcctgttgctgatggcataatccgggtgcaacccaaatctgagctcaagccaggtgagcttaagccactgagcaaggaagatttgggcctgcacgcctacaggtgtgaggactgtggcaagtgcaaatgtaaggagtgcacctacccaaggcctctgccatcagactggatctgcgacaagcagtgcctttgctcggcccagaacgtgattgactatgggacttgtgtatgctgtgtgaaaggtctcttctatcactgttctaatgatgatgaggacaactgtgctgacaacccatgttcttgcagccagtctcactgttgtacacgatggtcagccatgggtgtcatgtccctctttttgccttgtttatggtgttaccttccagccaagggttgccttaaattgtgccaggggtgttatgaccgggttaacaggcctggttgccgctgtaaaaactcaaacacagtttgctgcaaagttcccactgtcccccctaggaactttgaaaaaccaacatagcatcattaatcaggaatattacagtaatgaggattttttctttctttttttaatacacatatgcaaccaactaaacagttataatcttggcactgttaatagaaaggtgggatagtctttgctgtttgcggtgaaatgctttttgtccatgtgccgttttaactgatatgcttgttagaactcagctaatggagctcaaagtatgagatacagaacttggtgacccatgtattgcataagctaaagcaacacagacactcctaggcaaagtttttgtttgtgaatagtacttgcaaaacttgtaaattagcagatgacttttttccattgttttctccagagagaatgtgctatatttttgtatatacaataatatttgcaactgtgaaaaacaagttgtgccatactacatggcacagacacaaaatattatactaatatgttgtacattcggaagaatgtgaatcaatcagtatgtttttagattgtattttgccttacagaaagcctttattgtaagactctgatttccctttggacttcatgtatattgtacagttacagtaaaattcaacctttattttctaattttttcaacatattgtttagtgtaaagaatatttatttgaagttttattattttataaaaaagaatatttattttaagaggcatcttacaaattttgccccttttatgaggatgtgatagttgctgcaaatgaggggttacagatgcatatgtccaatataaaatagaaaatatattaacgtttgaaattaaaaaaaaaaaaaaaaaa

SEQ ID NO: 131 - DNA, 1602 bp, Homo sapiens
ggagatcgctgggagcggttgcgcgtgcggggagctgagttatagctgtgacttctgccctgccaggccgcacacagcggtctgacccggtttggtttgtaaatggaatttcaagcagtagtgatggcagtaggtggaggatctcggatgacagacctaacttccagcattcccaaacctctgcttccagttgggaacaaacctttaatttggtacccattgaacctgcttgagcgtgttggatttgaagaagtcattgtggttacaaccagggatgttcaaaaggctctatgtgcagaattcaagatgaaaatgaagccagatattgtgtgtattcctgatgacgctgacatgggaactgcagattctttgcgctacatatatccaaaacttaagacagatgtgctggtgctgagctgtgatctgataacagacgttgccttacatgaggttgtggacctgtttagagcttatgatgcatcacttgctatgttgatgagaaaaggccaagatagcatagaacctgttcccggtcaaaaggggaaaaaaaaagcagtggagcagcgtgacttcattggagtggacagcacaggaaagaggctgctcttcatggctaatgaagcagacttggatgaagagctggtcattaagggatccatcctacagaagcatcctagaatacgtttccacacgggtcttgtggatgcccacctctactgtttgaaaaaatacatcgtggatttcctaatggaaaatgggtcaataacttctatccggagtgaactgattccatatttagtgagaaaacagttttcctcagcttcctcacaacagggacaagaagaaaaagaggaggatctaaagaaaaaggagctgaagtccttagatatctacagttttataaaagaagccaatacactgaacctggctccctatgatgcctgctggaatgcctgtcgaggagacaggtgggaagacttgtccagatcacaggtgcgctgctatgtccacatcatgaaagaggggctctgctctcgagtgagcacactgggactctacatggaagcaaacagacaggtgcccaaattgctgtctgctctctgtccagaagaaccaccagtccattcgtcagcccagattgtcagcaaacacctggttggagttgacagcctcattgggccagagacacagattggagagaagtcatccattaagcgctcagtcattggctcatcctgtctcataaaagatagagtgactattaccaattgccttctcatgaactcagtcactgtggaggaaggaagcaatatccaaggcagtgtcatctgcaacaatgctgtgatcgagaagggtgcagacatcaaggactgcttgattggaagtggccagaggattgaagccaaagctaaacgagtgaatgaggtgatcgtggggaatgaccagctcatggagatctgagttctgagcaagtcagactccttccttttggcctccaaagccacagatgttggccggcccacctgtttaactctgtatttatttcccaataaagaagggcttccaaaggtaaaaaaaaaaaaaaaaaaaaaaaaaaaaaaa

SEQ ID NO: 132 - DNA, 2160 bp, Homo sapiens
atggccctgtccactgagcatcctcccgccacacagaaacccgcccagccggggccaccgaccccaccccctgcctggaaacttaaggaggccggagctgtggggagctcagagctgagatcctacaggagtccagggctggagagaaaacctctgcgaggaaagggaaggagcaagccgtgaatttaagggacgctgtgaagcaatcatggatgcaatgaagagagggctctgctgtgtgctgctgctgtgtggagcagtcttcgtttcgcccagccaggaaatccatgcccgattcagaagaggagccagatcttaccaagtgatctgcagagatgaaaaaacgcagatgatataccagcaacatcagtcatggctgcgccctgtgctcagaagcaaccgggtggaatattgctggtgcaacagtggcagggcacagtgccactcagtgcctgtcaaaagttgcagcgagccaaggtgtttcaacgggggcacctgccagcaggccctgtacttctcagatttcgtgtgccagtgccccgaaggatttgctgggaagtgctgtgaaatagataccagggccacgtgctacgaggaccagggcatcagctacaggggcacgtggagcacagcggagagtggcgccgagtgcaccaactggaacagcagcgcgttggcccagaagccctacagcgggcggaggccagacgccatcaggctgggcctggggaaccacaactactgcagaaacccagatcgagactcaaagccctggtgctacgtctttaaggcggggaagtacagctcagagttctgcagcacccctgcctgctctgagggaaacagtgactgctactttgggaatgggtcagcctaccgtggcacgcacagcctcaccgagtcgggtgcctcctgcctcccgtggaattccatgatcctgataggcaaggtttacacagcacagaaccccagtgcccaggcactgggcctgggcaaacataattactgccggactggacggagtgtgagctctccggctacggcaagcatgaggccttgtctcctttctattcggagcggctgaaggaggctcatgtcagactgtacccatccagccgctgcacatcacaacatttacttaacagaacagtcaccgacaacatgctgtgtgctggagacactcggagcggcgggccccaggcaaacttgcacgacgcctgccagggcgattcgggaggccccctggtgtgtctgaacgatggccgcatgactttggtgggcatcatcagctggggcctgggctgtggacagaaggatgtcccgggtgtgtacaccaaggttaccaactacctagactggattcgtgacaacatgcgaccgtgaccaggaacacccgactcctcaaaagcaaatgagatcccgcctcttcttcttcagaagacactgcaaaggcgcagtgcttctctacagacttctccagacccaccacaccgcagaagcgggacgagaccctacaggagagggaagagtgcattttcccagatacttcccattttggaagttttcaggacttggtctgatttcaggatactctgtcagatgggaagacatgaatgcacactagcctctccaggaatgcctcctccctgggcagaaagtggccatgccaccctgttttcagctaaagcccaacctcctgacctgtcaccgtgagcagctttggaaacaggaccacaaaaatgaaagcatgtctcaatagtaaaagataacaagatctttcaggaaagacggattgcattagaaatagacagtatatttatagtcacaagagcccagcagggcctcaaagttggggcaggctggctggcccgtcatgttcctcaaaagcacccttgacgtcaagtctccttcccctttccccactccctggctctcagaaggtattccttttgtgtacagtgtgtaaagtgtaaatcctttttctttataaactttagagtagcatgagagaattgtatcatttgaacaactaggcttcagcatatttatagcaatccatgttagtttttactttctgttgccacaaccctgttttatactgtacttaataaattcagatatatttttcacagtttttccaaaaaaaaaaaaaaaaaaaaa

SEQ ID NO: 133 - DNA, 6447 bp, Homo sapiens
aggtctccgcttggagccgccgcacccgggacggtgcgtatcgctggaagtccggccttccgagagctagctgtccgccgcggcccccgcacgccgggcagccgtccctcgcgcctcgggcgcgccaccatggggccccggctcagcgtctggctgctgctgctgcccgccgcccttctgctccacgaggagcacagccgggccgctgcgaagggtggctgtgctggctctggctgtggcaaatgtgactgccatggagtgaagggacaaaagggtgaaagaggcctcccggggttacaaggtgtcattgggtttcctggaatgcaaggacctgaggggccacagggaccaccaggacaaaagggtgatactggagaaccaggactacctggaacaaaagggacaagaggacctccgggagcatctggctaccctggaaacccaggacttcccggaattcctggccaagacggcccgccaggccccccaggtattccaggatgcaatggcacaaagggggagagagggccgctcgggcctcctggcttgcctggtttcgcaggaaatcccggaccaccaggcttaccagggatgaagggtgatccaggtgagatacttggccatgtgcccgggatgctgttgaaaggtgaaagaggatttcccggaatcccagggactccaggcccaccaggactgccagggcttcaaggtcctgttgggcctccaggatttaccggaccaccaggtcccccaggccctcccggccctccaggtgaaaagggacaaatgggcttaagttttcaaggaccaaaaggtgacaagggtgaccaaggggtcagtgggcctccaggagtaccaggacaagctcaagttcaagaaaaaggagacttcgccaccaagggagaaaagggccaaaaaggtgaacctggatttcaggggatgccaggggtcggagagaaaggtgaacccggaaaaccaggacccagaggcaaacccggaaaagatggtgacaaaggggaaaaagggagtcccggttttcctggtgaacccgggtacccaggactcataggccgccagggcccgcagggagaaaagggtgaagcaggtcctcctggcccacctggaattgttataggcacaggacctttgggagaaaaaggagagaggggctaccctggaactccggggccaagaggagagccaggcccaaaaggtttcccaggactaccaggccaacccggacctccaggcctccctgtacctgggcaggctggtgcccctggcttccctggtgaaagaggagaaaaaggtgaccgaggatttcctggtacatctctgccaggaccaagtggaagagatgggctcccgggtcctcctggttcccccgggccccctgggcagcctggctacacaaatggaattgtggaatgtcagcccggacctccaggtgaccagggtcctcctggaattccagggcagccaggatttataggcgaaattggagagaaaggtcaaaaaggagagagttgcctcatctgtgatatagacggatatcgggggcctcccgggccacagggacccccgggagaaataggtttcccagggcagccaggggccaagggcgacagaggtttgcctggcagagatggtgttgcaggagtgccaggccctcaaggtacaccagggctgataggccagccaggagccaagggggagcctggtgagttttatttcgacttgcggctcaaaggtgacaaaggagacccaggctttccaggacagcccggcatgccagggagagcgggttctcctggaagagatggccatccgggtcttcctggccccaagggctcgccgggttctgtaggattgaaaggagagcgtggcccccctggaggagttggattcccaggcagtcgtggtgacaccggcccccctgggcctccaggatatggtcctgctggtcccattggtgacaaaggacaagcaggctttcctggaggccctggatccccaggcctgccaggtccaaagggtgaaccaggaaaaattgttcctttaccaggcccccctggagcagaaggactgccggggtccccaggcttcccaggtccccaaggagaccgaggctttcccggaaccccaggaaggccaggcctgccaggagagaagggcgctgtgggccagccaggcattggatttccagggccccccggccccaaaggtgttgacggcttacctggagacatggggccaccggggactccaggtcgcccgggatttaatggcttacctgggaacccaggtgtgcagggccagaagggagagcctggagttggtctaccgggactcaaaggtttgccaggtcttcccggcattcctggcacacccggggagaaggggagcattggggtaccaggcgttcctggagaacatggagcgatcggaccccctgggcttcaggggatcagaggtgaaccgggacctcctggattgccaggctccgtggggtctccaggagttccaggaataggcccccctggagctaggggtccccctggaggacagggaccaccggggttgtcaggccctcctggaataaaaggagagaagggtttccccggattccctggactggacatgccgggccctaaaggagataaaggggctcaaggactccctggcataacgggacagtcggggctccctggccttcctggacagcagggggctcctgggattcctgggtttccaggttccaagggagaaatgggcgtcatggggacccccgggcagccgggctcaccaggaccagtgggtgctcctggattaccgggtgaaaaaggggaccatggctttccgggctcctcaggacccaggggagaccctggcttgaaaggtgataagggggatgtcggtctccctggcaagcctggctccatggataaggtggacatgggcagcatgaagggccagaaaggagaccaaggagagaaaggacaaattggaccaattggtgagaagggatcccgaggagaccctgggaccccaggagtgcctggaaaggacgggcaggcaggacagcctgggcagccaggacctaaaggtgatccaggtataagtggaaccccaggtgctccaggacttccgggaccaaaaggatctgttggtggaatgggcttgccaggaacacctggagagaaaggtgtgcctggcatccctggcccacaaggttcacctggcttacctggagacaaaggtgcaaaaggagagaaagggcaggcaggcccacctggcataggcatcccaggactgcgtggtgaaaagggagatcaagggatagcgggtttcccaggaagccctggagagaagggagaaaaaggaagcattgggatcccaggaatgccagggtccccaggccttaaagggtctcccgggagtgttggctatccaggaagtcctgggctacctggagaaaaaggtgacaaaggcctcccaggattggatggcatccctggtgtcaaaggagaagcaggtcttcctgggactcctggccccacaggcccagctggccagaaaggggagccaggcagtgatggaatcccggggtcagcaggagagaagggtgaaccaggtctaccaggaagaggattcccagggtttccaggggccaaaggagacaaaggttcaaagggtgaggtgggtttcccaggattagccgggagcccaggaattcctggatccaaaggagagcaaggattcatgggtcctccggggccccagggacagccggggttaccgggatccccaggccatgccacggaggggcccaaaggagaccgcggacctcagggccagcctggcctgccaggacttccgggacccatggggcctccagggcttcctgggattgatggagttaaaggtgacaaaggaaatccaggctggccaggagcacccggtgtcccagggcccaagggagaccctggattccagggcatgcctggtattggtggctctccaggaatcacaggctctaagggtgatatggggcctccaggagttccaggatttcaaggtccaaaaggtcttcctggcctccagggaattaaaggtgatcaaggcgatcaaggcgtcccgggagctaaaggtctcccgggtcctcctggccccccaggtccttacgacatcatcaaaggggagcccgggctccctggtcctgagggccccccagggctgaaagggcttcagggactgccaggcccgaaaggccagcaaggtgttacaggattggtgggtatacctggacctccaggtattcctgggtttgacggtgcccctggccagaaaggagagatgggacctgccgggcctactggtccaagaggatttccaggtccaccaggccccgatgggttgccaggatccatggggcccccaggcaccccatctgttgatcacggcttccttgtgaccaggcatagtcaaacaatagatgacccacagtgtccttctgggaccaaaattctttaccacgggtactctttgctctacgtgcaaggcaatgaacgggcccatggacaggacttgggcacggccggcagctgcctgcgcaagttcagcacaatgcccttcctgttctgcaatattaacaacgtgtgcaactttgcatcacgaaatgactactcgtactggctgtccacccctgagcccatgcccatgtcaatggcacccatcacgggggaaaacataagaccatttattagtaggtgtgctgtgtgtgaggcgcctgccatggtgatggccgtgcacagccagaccattcagatcccaccgtgccccagcgggtggtcctcgctgtggatcggctactcttttgtgatgcacaccagcgctggtgcagaaggctctggccaagccctggcgtcccccggctcctgcctggaggagtttagaagtgcgccattcatcgagtgtcacggccgtgggacctgcaattactacgcaaacgcttacagcttttggctcgccaccatagagaggagcgagatgttcaagaagcctacgccgtccaccttgaaggcaggggagctgcgcacgcacgtcagccgctgccaagtctgtatgagaagaacataagaagcctgactcagctaatgtcacaacatggtgctacttcttcttctttttgttaacagcaacgaaccctagaaatatatcctgtgtacctcactgtccaatatgaaaaccgtaaagtgccttataggaatttgcgtaactaacacaccctgcttcattgacctctacttgctgaaggagaaaaagacagcgataagcttcaatagtggcataccaaatggcacttttgatgaaataaaatatcaatattttctgcaatccaatgcactgatgtgtgaagtgagaactccatcagaaaaccaaagggtgctaggaggtgtgggtgccttccatactgtttgcccattttcattcttgtattataattaattttctacccccagagataaatgtttgtttatatcactgtctagctgtttcaaaatttaggtcccttggtctgtacaaataatagcaatgtaaaaatggttttttgaacctccaaatggaattacagactcagtagccatatcttccaaccccccagtataaatttctgtctttctgctatgtgtggtactttgcagctgcttttgcagaaatcacaattttcctgtggaataaagatggtccaaaaatagtcaaaaattaaatatatatatatattagtaatttatatagatgtcagcaattaggcagatcaaggtttagtttaacttccactgttaaaataaagcttacatagttttcttcctttgaaagactgtgctgtcctttaacataggtttttaaagactaggatattgaatgtgaaacatccgttttcattgttcacttctaaaccaaaaattatgtgttgccaaaaccaaacccaggttcatgaatatggtgtctattatagtgaaacatgtactttgagcttattgtttttattctgtattaaatattttcagggttttaaacactaatcacaaactgaatgacttgacttcaaaagcaacaaccttaaaggccgtcatttcattagtattcctcattctgcatcctggcttgaaaaacagctctgttgaatcacagtatcagtattttcacacgtaagcacattcgggccatttccgtggtttctcatgagctgtgttcacagacctcagcagggcatcgcatggaccgcaggagggcagattcggaccactaggcctgaaatgacatttcactaaaagtctccaaaacatttctaagactactaaggccttttatgtaatttctttaaatgtgtatttcttaagaattcaaatttgtaataaaactatttgtataaaaattaagctt

SEQ ID NO: 134 - DNA, 1653 bp, Homo sapiens
acgtccggggaggggccaggtgagcggcagacccggcacgcaggtgggggccggcggggtccgtggccagagctgcagagagacaaggcggcggcggctgctgtgctgggtgcagtgaggaagaggccctcggtggtgcccatggctggccaggatcctgcgctgagcacgagtcacccgttctacgacgtggccagacatggcattctgcaggtggcaggggatgaccgctttggaagacgtgttgtcacgttcagctgctgccggatgccgccctcccacgagctggaccaccagcggctgctggagtatttgaagtacacactggaccaatacgttgagaacgattataccatcgtctatttccactacgggctgaacagccggaacaagccttccctgggctggctccagagcgcatacaaggagttcgataggaaagacggggatctcactatgtggcccaggctggtctcgaactccaagctcaagcgatcctcccacctcagcctcccaaagtactgggattacaggtacaagaagaacttgaaggccctctacgtggtgcaccccaccagcttcatcaaggtcctgtggaacatcttgaagcccctcatcagtcacaagtttgggaagaaagtcatctatttcaactacctgagtgagctccacgaacaccttaaatacgaccagctggtcatccctcccgaagttttgcggtacgatgagaagctccagagcctgcacgagggccggacgccgcctcctaccaagacaccaccgccgcggcccccgctgcccacacagcagtttggcgtcagtctgcaatacctcaaagacaaaaatcaaggcgaactcatcccccctgtgctgaggttcacagtgacgtacctgagagagaaaggcctgcgcaccgagggcctgttccggagatccgccagcgtgcagaccgtccgcgagatccagaggctctacaaccaagggaagcccgtgaactttgacgactacggggacattcacatccctgccgtgatcctgaagaccttcctgcgagagctgccccagccgcttctgaccttccaggcctacgagcagattctcgggatcacctgtgtggagagcagcctgcgtgtcactggctgccgccagatcttacggagcctcccagagcacaactacgtcgtcctccgctacctcatgggctttctgcatgcggtgtcccgggagagcatcttcaacaaaatgaacagctctaacctggcctgtgtcttcgggctgaatttgatctggccatcccagggggtctcctccctgagtgcccttgtgcccctgaacatgttcactgaactgctgatcgagtactatgaaaagatcttcagcaccccggaggcacctggggagcacggcctggcaccatgggaacaggggagcagggcagcccctttgcaggaggctgtgccacggacacaagccacgggcctcaccaagcctaccctacctccgagtcccctgatggcagccagaagacgtctctagtgttgcgaacactctgtatgtttcgagctacctcccacacctgtctgtgcacttgtatgttttgtaaacttggcatctgtaaaaataaccagccattagatgaattcagaaccttct

SEQ ID NO: 135 - DNA, 1247 bp, Homo sapiens
gtaaagctagaccgatctccggggagccccggagtaggcgagcggcggccgccagctagttgagcgcaccccccgcccgccccagcggcgccgcggcgggcggcgtccaggcggcatggagaaggacggcctgtgccgcgctgaccagcagtacgaatgcgtggcggagatcggggagggcgcctatgggaaggtgttcaaggcccgcgacttgaagaacggaggccgtttcgtggcgttgaagcgcgtgcgggtgcagaccggcgaggagggcatgccgctctccaccatccgcgaggtggcggtgctgaggcacctggagaccttcgagcaccccaacgtggtcaggttgtttgatgtgtgcacagtgtcacgaacagacagagaaaccaaactaactttagtgtttgaacatgtcgatcaagacttgaccacttacttggataaagttccagagcctggagtgcccactgaaaccataaaggatatgatgtttcagcttctccgaggtctggactttcttcattcacaccgagtagtgcatcgcgatctaaaaccacagaacattctggtgaccagcagcggacaaataaaactcgctgacttcggccttgcccgcatctatagtttccagatggctctaacctcagtggtcgtcacgctgtggtacagagcacccgaagtcttgctccagtccagctacgccacccccgtggatctctggagtgttggctgcatatttgcagaaatgtttcgtagaaagcctctttttcgtggaagttcagatgttgatcaactaggaaaaatcttggacgtgattggactcccaggagaagaagactggcctagagatgttgcccttcccaggcaggcttttcattcaaaatctgcccaaccaattgagaagtttgtaacagatatcgatgaactaggcaaagacctacttctgaagtgtttgacatttaacccagccaaaagaatatctgcctacagtgccctgtctcacccatacttccaggacctggaaaggtgcaaagaaaacctggattcccacctgccgcccagccagaacacctcggagctgaatacagcctgaggcctcagcagccgccttaagctgatcctgcggagaacacccttggtggcttatgggtccccctcagcaagccctacagagctgtggaggattgctatctggaggccttccagctgctgtcttctggacaggctctgcttctccaaggaaa

SEQ ID NO: 136 - DNA, 4577 bp, Homo sapiens
gctacaatccatctggtctcctccagctccttctttctgcaacatggggaagaacaaactccttcatccaagtctggttcttctcctcttggtcctcctgcccacagacgcctcagtctctggaaaaccgcagtatatggttctggtcccctccctgctccacactgagaccactgagaagggctgtgtccttctgagctacctgaatgagacagtgactgtaagtgcttccttggagtctgtcaggggaaacaggagcctcttcactgacctggaggcggagaatgacgtactccactgtgtcgccttcgctgtcccaaagtcttcatccaatgaggaggtaatgttcctcactgtccaagtgaaaggaccaacccaagaatttaagaagcggaccacagtgatggttaagaacgaggacagtctggtctttgtccagacagacaaatcaatctacaaaccagggcagacagtgaaatttcgtgttgtctccatggatgaaaactttcaccccctgaatgagttgattccactagtatacattcaggatcccaaaggaaatcgcatcgcacaatggcagagtttccagttagagggtggcctcaagcaattttcttttcccctctcatcagagcccttccagggctcctacaaggtggtggtacagaagaaatcaggtggaaggacagagcaccctttcaccgtggaggaatttgttcttcccaagtttgaagtacaagtaacagtgccaaagataatcaccatcttggaagaagagatgaatgtatcagtgtgtggcctatacacatatgggaagcctgtccctggacatgtgactgtgagcatttgcagaaagtatagtgacgcttccgactgccacggtgaagattcacaggctttctgtgagaaattcagtggacagctaaacagccatggctgcttctatcagcaagtaaaaaccaaggtcttccagctgaagaggaaggagtatgaaatgaaacttcacactgaggcccagatccaagaagaaggaacagtggtggaattgactggaaggcagtccagtgaaatcacaagaaccataaccaaactctcatttgtgaaagtggactcacactttcgacagggaattcccttctttgggcaggtgcgcctagtagatgggaaaggcgtccctataccaaataaagtcatattcatcagaggaaatgaagcaaactattactccaatgctaccacggatgagcatggccttgtacagttctctatcaacaccaccaacgttatgggtacctctcttactgttagggtcaattacaaggatcgtagtccctgttacggctaccagtgggtgtcagaagaacacgaagaggcacatcacactgcttatcttgtgttctccccaagcaagagctttgtccaccttgagcccatgtctcatgaactaccctgtggccatactcagacagtccaggcacattatattctgaatggaggcaccctgctggggctgaagaagctctccttttattatctgataatggcaaagggaggcattgtccgaactgggactcatggactgcttgtgaagcaggaagacatgaagggccatttttccatctcaatccctgtgaagtcagacattgctcctgtcgctcggttgctcatctatgctgttttacctaccggggacgtgattggggattctgcaaaatatgatgttgaaaattgtctggccaacaaggtggatttgagcttcagcccatcacaaagtctcccagcctcacacgcccacctgcgagtcacagcggctcctcagtccgtctgcgccctccgtgctgtggaccaaagcgtgctgctcatgaagcctgatgctgagctctcggcgtcctcggtttacaacctgctaccagaaaaggacctcactggcttccctgggcctttgaatgaccaggacgatgaagactgcatcaatcgtcataatgtctatattaatggaatcacatatactccagtatcaagtacaaatgaaaaggatatgtacagcttcctagaggacatgggcttaaaggcattcaccaactcaaagattcgtaaacccaaaatgtgtccacagcttcaacagtatgaaatgcatggacctgaaggtctacgtgtaggtttttatgagtcagatgtaatgggaagaggccatgcacgcctggtgcatgttgaagagcctcacacggagaccgtacgaaagtacttccctgagacatggatctgggatttggtggtggtaaactcagcaggggtggctgaggtaggagtaacagtccctgacaccatcaccgagtggaaggcaggggccttctgcctgtctgaagatgctggacttggtatctcttccactgcctctctccgagccttccagcccttctttgtggagcttacaatgccttactctgtgattcgtggagaggccttcacactcaaggccacggtcctaaactaccttcccaaatgcatccgggtcagtgtgcagctggaagcctctcccgccttccttgctgtcccagtggagaaggaacaagcgcctcactgcatctgtgcaaacgggcggcaaactgtgtcctgggcagtaaccccaaagtcattaggaaatgtgaatttcactgtgagcgcagaggcactagagtctcaagagctgtgtgggactgaggtgccttcagttcctgaacacggaaggaaagacacagtcatcaagcctctgttggttgaacctgaaggactagagaaggaaacaacattcaactccctactttgtccatcaggtggtgaggtttctgaagaattatccctgaaactgccaccaaatgtggtagaagaatctgcccgagcttctgtctcagttttgggagacatattaggctctgccatgcaaaacacacaaaatcttctccagatgccctatggctgtggagagcagaatatggtcctctttgctcctaacatctatgtactggattatctaaatgaaacacagcagcttactccagaggtcaagtccaaggccattggctatctcaacactggttaccagagacagttgaactacaaacactatgatggctcctacagcacctttggggagcgatatggcaggaaccagggcaacacctggctcacagcctttgttctgaagacttttgcccaagctcgagcctacatcttcatcgatgaagcacacattacccaagccctcatatggctctcccagaggcagaaggacaatggctgtttcaggagctctgggtcactgctcaacaatgccataaagggaggagtagaagatgaagtgaccctctccgcctatatcaccatcgcccttctggagattcctctcacagtcactcaccctgttgtccgcaatgccctgttttgcctggagtcagcctggaagacagcacaagaaggggaccatggcagccatgtatataccaaagcactgctggcctatgcttttgccctggcaggtaaccaggacaagaggaaggaagtactcaagtcacttaatgaggaagctgtgaagaaagacaactctgtccattgggagcgccctcagaaacccaaggcaccagtggggcatttttacgaaccccaggctccctctgctgaggtggagatgacatcctatgtgctcctcgcttatctcacggcccagccagccccaacctcggaggacctgacctctgcaaccaacatcgtgaagtggatcacgaagcagcagaatgcccagggcggtttctcctccacccaggacacagtggtggctctccatgctctgtccaaatatggagccgccacatttaccaggactgggaaggctgcacaggtgactatccagtcttcagggacattttccagcaaattccaagtggacaacaacaatcgcctgttactgcagcaggtctcattgccagagctgcctggggaatacagcatgaaagtgacaggagaaggatgtgtctacctccagacctccttgaaatacaatattctcccagaaaaggaagagttcccctttgctttaggagtgcagactctgcctcaaacttgtgatgaacccaaagcccacaccagcttccaaatctccctaagtgtcagttacacagggagccgctctgcctccaacatggcgatcgttgatgtgaagatggtctctggcttcattcccctgaagccaacagtgaaaatgcttgaaagatctaaccatgtgagccggacagaagtcagcagcaaccatgtcttgatttaccttgataaggtgtcaaatcagacactgagcttgttcttcacggttctgcaagatgtcccagtaagagatctcaaaccagccatagtgaaagtctatgattactacgagacggatgagtttgcaatcgctgagtacaatgctccttgcagcaaagatcttggaaatgcttgaagaccacaaggctgaaaagtgctttgctggagtcctgttctctgagctccacagaagacacgtgtttttgtatctttaaagacttgatgaataaacactttttctggtc

SEQ ID NO: 137 - DNA, 1705 bp, Homo sapiens
ccgagccgagcgccgagcagggagcgggcggccgcgctccgggccggggtcccgggggagcagatcctcagaatggcccttggtgctgcaggcgcggtgggctccgggcccaggcaccgagggggcactggatgactctccaggtgcaggaccctgccatctatgactccaggtcttcagcacccacccaccgtggtacagcgccccgggatgccgtctggagcccggatgccccaccagggggcgcccatgggccccccgggctccccgtacatgggcagccccgccgtgcgacccggcctggcccccgcgggcatggagcccgcccgcaagcgagcagcgcccccgcccgggcagagccaggcacagagccagggccagccggtgcccaccgcccccgcgcggagccgcagtgccaagaggaggaagatggctgacaaaatcctccctcaaaggattcgggagctggtccccgagtcccaggcttacatggacctcttggcatttgagaggaaactggatcaaaccatcatgcggaagcgggtggacatccaggaggctctgaagaggcccatgaagcaaaagcggaagctgcgactctatatctccaacacttttaaccctgcgaagcctgatgctgaggattccgacggcagcattgcctcctgggagctacgggtggaggggaagctcctggatgatcccagcaaacagaagcggaagttctcttctttcttcaagagtttggtcatcgagctggacaaagatctttatggccctgacaaccacctcgttgagtggcatcggacacccacgacccaggagacggacggcttccaggtgaaacggcctggggacctgagtgtgcgctgcacgctgctcctcatgctggactaccagcctccccagttcaaactggatccccgcctagcccggctgctggggctgcacacacagagccgctcagccattgtccaggccctgtggcagtatgtgaagaccaacaggctgcaggactcccatgacaaggaatacatcaatggggacaagtatttccagcagatttttgattgtccccggctgaagttttctgagattccccagcgcctcacagccctgctattgccccctgacccaattgtcatcaaccatgtcatcagcgtggacccttcagaccagaagaagacggcgtgctatgacattgacgtggaggtggaggagccattaaaggggcagatgagcagcttcctcctatccacggccaaccagcaggagatcagtgctctggacagtaagatccatgagacgattgagtccataaaccagctcaagatccagagggacttcatgctaagcttctccagagaccccaaaggctatgtccaagacctgctccgctcccagagccgggacctcaaggtgatgacagatgtagccggcaaccctgaagaggagcgccgggctgagttctaccaccagccctggtcccaggaggccgtcagtcgctacttctactgcaagatccagcagcgcaggcaggagctggagcagtcgctggttgtgcgcaacacctaggagcccaaaaataagcagcacgacggaactttcagccgtgtcccgggccccagcattttgccccgggctccagcatcactcctctgccaccttggggtgtggggctggattaaaagtcattcatctgaca

SEQ ID NO: 138 - DNA, 1510 bp, Homo sapiens
atcctgctgctgccgccaccgctgctgctgctctgcaaaattcagctgctgcctctgtcttgaggaccccagcgcctttcccccggggccatgctgcctgcagccacagcctccctcctggggcccctcctcactgcctgcgccctgctgccttttgcccagggccagacccccaactacaccagacccgtgttcctgtgcggaggggatgtgaagggggaatcaggttacgtggcaagtgaggggttccccaactcctacccccctaataaggagtgcatctggaccataacggtccccgagggccagactgtgtccctctcattccgagtcttcgacctggagctgcaccccgcctgccgctacgatgctctggaggtcttcgctgggtctgggacttccggccagcggctcggacgcttttgtgggaccttccggcctgcgcccctagtcgcccccggcaaccaggtgaccctgaggatgacgacggatgagggcacaggaggacgaggcttcctgctctggtacagcgggcgggccacctcgggctctgagcaccaattttgcggggggcggctggagaaggcccagggaaccctgaccacgcccaactggcccgagtccgattaccccccgggcatcagctgttcctggcacatcatcgcgcccccggaccaggtcatcgcgctgaccttcgagaagtttgacctggagccggacacctactgccgctatgactcggtcagcgtcttcaacggagccgtgagcgacgactcccggaggctggggaagttctgcggcgacgcagtcccgggctccatctcctccgaagggaatgaactcctcgtccagttcgtctcagatctcagtgtcaccgctgatggcttctcagcctcctacaagaccctgccgcggggcactgccaaagaagggcaagggcccggccccaaacggggaactgagcctaaagtcaagctgccccccaagtcccaacctccggagaaaacagaggaatctccttcagcccctgatgcacccacctgcccaaagcagtgccgccggacaggcaccttgcagagcaacttctgtgccagcagccttgtggtgactgcgacagtgaagtccatggttcgggagccaggggagggccttgccgtgactgtcagtcttattggtgcttataaaactggaggactggacctgccaactccacccactggtgcctccctgaagttttacgtgccttgcaagcagtgcccccccatgaagaaaggagtcagttatctgctgatgggccaggtagaagagaacagaggccccgtccttcctccagagagctttgtggttctccaccggcccaaccaggaccagatcctcaccaacctaagcaagaggaagtgcccctctcaacctgtgcgggctgctgcgtcccaggactgagacgcaggccagccccggcccctagccctcaggcctctcttcttatccaaataaatgtttcttaatgaaa

SEQ ID NO: 139 - DNA, 2797 bp, Homo sapiens
ttccccagcattcgagaaactcctctctactttagcacggtctccagactcagccgagagacagcaaactgcagcgcggtgagagagcgagagagagggagagagagactctccagcctgggaactataactcctctgcgagaggcggagaactccttccccaaatcttttggggacttttctctctttacccacctccgcccctgcgaggagttgaggggccagttcggccgccgcgcgcgtcttcccgttcggcgtgtgcttggcccggggaaccgggagggcccggcgatcgcgcggcggccgccgcgagggtgtgagcgcgcgtgggcgcccgccgagccgaggccatggtgcagcaaaccaacaatgccgagaacacggaagcgctgctggccggcgagagctcggactcgggcgccggcctcgagctgggaatcgcctcctcccccacgcccggctccaccgcctccacgggcggcaaggccgacgacccgagctggtgcaagaccccgagtgggcacatcaagcgacccatgaacgccttcatggtgtggtcgcagatcgagcggcgcaagatcatggagcagtcgcccgacatgcacaacgccgagatctccaagcggctgggcaaacgctggaagctgctcaaagacagcgacaagatccctttcattcgagaggcggagcggctgcgcctcaagcacatggctgactaccccgactacaagtaccggcccaggaagaaggtgaagtccggcaacgccaactccagctcctcggccgccgcctcctccaagccgggggagaagggagacaaggtcggtggcagtggcgggggcggccatgggggcggcggcggcggcgggagcagcaacgcggggggaggaggcggcggtgcgagtggcggcggcgccaactccaaaccggcgcagaaaaagagctgcggctccaaagtggcgggcggcgcgggcggtggggttagcaaaccgcacgccaagctcatcctggcaggcggcggcggcggcgggaaagcagcggctgccgccgccgcctccttcgccgccgaacaggcgggggccgccgccctgctgcccctgggcgccgccgccgaccaccactcgctgtacaaggcgcggactcccagcgcctcggcctccgcctcctcggcagcctcggcctccgcagcgctcgcggccccgggcaagcacctggcggagaagaaggtgaagcgcgtctacctgttcggcggcctgggcacgtcgtcgtcgcccgtgggcggcgtgggcgcgggagccgaccccagcgaccccctgggcctgtacgaggaggagggcgcgggctgctcgcccgacgcgcccagcctgagcggccgcagcagcgccgcctcgtcccccgccgccggccgctcgcccgccgaccaccgcggctacgccagcctgcgcgccgcctcgcccgccccgtccagcgcgccctcgcacgcgtcctcctcggcctcgtcccactcctcctcttcctcctcctcgggctcctcgtcctccgacgacgagttcgaagacgacctgctcgacctgaaccccagctcaaactttgagagcatgtccctgggcagcttcagttcgtcgtcggcgctcgaccgggacctggattttaacttcgagcccggctccggctcgcacttcgagttcccggactactgcacgcccgaggtgagcgagatgatctcgggagactggctcgagtccagcatctccaacctggttttcacctactgaagggcgcgcaggcagggagaagggccggggggggtaggagaggagaaaaaaaaagtgaaaaaaagaaacgaaaaggacagacgaagagtttaaagagaaaagggaaaaaagaaagaaaaagtaagcagggctcgttcgcccgcgttctcgtcgtcggatcaaggagcgcggcggcgttttggacccgcgctcccatcccccaccttcccgggccggggacccactctgcccagccggagggacgcggaggaggaagagggtagacaggggcgacctgtgattgttgttattgatgttgttgttgatggcaaaaaaaaaaagcgacttcgagtttgctcccctttgcttgaagagaccccctcccccttccaacgagcttccggacttgtctgcacccccagcaagaaggcgagttagttttctagagacttgaaggagtctcccccttcctgcatcaccaccttggttttgttttattttgcttcttggtcaagaaaggaggggagaacccagcgcacccctccccccctttttttaaacgcgtgatgaagacagaaggctccggggtgacgaatttggccgatggcagatgttttgggggaacgccgggactgagagactccacgcaggcgaattcccgtttggggcctttttttcctccctcttttccccttgccccctctgcagccggaggaggagatgttgaggggaggaggccagccagtgtgaccggcgctaggaaatgacccgagaaccccgttggaagcgcagcagcgggagctaggggcgggggcggaggaggacacgaactggaagggggttcacggtcaaactgaaatggatttgcacgttggggagctggcggcggcggctgctgggcctccgccttcttttctacgtgaaatcagtgaggtgagacttcccagaccccggaggcgtggaggagaggagactgtttgatgtggtacaggggcagtcagtggagggcgagtggtttcggaaaaaaaaaaagaaaaaaaggg

SEQ ID NO: 140 - DNA, 634 bp, Homo sapiens
cggctgagaggcagcgaactcatctttgccagtacaggagcttgtgccgtggcccacagcccacagcccacagccatgggctgggacctgacggtgaagatgctggcgggcaacgaattccaggtgtccctgagcagctccatgtcggtgtcagagctgaaggcgcagatcacccagaagattggcgtgcacgccttccagcagcgtctggctgtccacccgagcggtgtggcgctgcaggacagggtcccccttgccagccagggcctgggccctggcagcacggtcctgctggtggtggacaaatgcgacgaacctctgagcatcctggtgaggaataacaagggccgcagcagcacctacgaggtccggctgacgcagaccgtggcccacctgaagcagcaagtgagcgggctggagggtgtgcaggacgacctgttctggctgaccttcgaggggaagcccctggaggaccagctcccgctgggggagtacggcctcaagcccctgagcaccgtgttcatgaatctgcgcctgcggggaggcggcacagagcctggcgggcggagctaagggcctccaccagcatccgagcaggatcaagggccggaaataaaggctgttgtaagagaat

SEQ ID NO: 141 - DNA, 2653 bp, Homo sapiens
ggcacgaggctcgggttgtgccaccgctggactcccgtgtccctccgcgcaggcgggcggccccggagcgctggtgccggcagaggcggcgacggtggcgcccctcctcatcatgaacagaggcttctcccgaaaaagccacacattcctgcccaagatcttcttccgcaagatgtcatcctcaggggccaaggacaagcctgagctgcagtttcccttccttcaggatgaggacacagtggccacgctgctagagtgcaagacgctcttcatcttgcgcggcctgccaggaagcggcaagtccacgctggcacgggtcatcgtggacaagtaccgtgatggcaccaagatggtgtcggctgacgcttacaagatcacccccggcgctcgaggagccttctccgaggagtacaagcggctcgatgaggacctggctgcctactgccgccgccgggacatcagaattcttgtgcttgatgacaccaaccacgaacgggaacggctggagcagctctttgaaatggccgaccagtaccagtaccaggtggtgctggtggagcccaagacggcgtggcggctggactgtgcccagctcaaggagaagaaccagtggcagctgtcggctgatgacctgaagaagctgaagcctgggctggagaaggacttcctgccgctctacttcggctggttcctgaccaagaagagctctgagaccctccgcaaagccggccaggtcttcctggaagagctggggaaccacaaggccttcaagaaggagctgcgacaattcgtccctggggatgagcccagggagaagatggacttggtcacctactttggaaagagacccccaggcgtgctgcattgcacaaccaagttttgtgactacgggaaggctcccggggcagaggagtacgctcaacaagatgtgttaaagaaatcttactccaaggccttcacgctgaccatctctgccctctttgtgacacccaagacgactggggcccgggtggagttaagcgagcagcaactgcagttgtggccgagtgatgtggacaagctgtcacccactgacaacctgccgcgggggagccgcgcccacatcaccctcggctgtgcagctgacgtagaggccgtgcagacgggccttgacctcttagagattctgcggcaggagaaggggggcagccgaggcgaggaggtgggcgagctaagccggggcaagctctattccttgggcaatgggcgctggatgctgaccctggccaagaacatggaggtcagggccatcttcacgggatactacgggaaaggcaaacctgtgcccacgcaaggtagccggaaggggggcgccttgcagtcctgcaccatcatatgagtgttctcaccaccacttatgcccctagaagggaaggggagagggaaacgtgccctctgtttgatccttgttttgtgacattttttttttttttttttttactcaaagttaacctacctgtaactttttaaaaacttgtaaaataactgaccctcccttcctgtccgccctcttcccctctaatgctcacgctcccaacacaaggtgggcagggaggcaccattcaggaacctggaccaaagctgacgaggctgggccaagccagggatggggccacagccagaaccccgagccctacttccaggttctggttagctcagccccagcccagcccagctgctctgcccagagctgggtgagtggggagacacctcagagccccgcaaaacccactgaccggaggcaaaaggcagtggggctgggggtagttttccatggtcacagagaactagtggtggctctgagaaggggaggacctctgggctttgattccatctccttgtcttttttctttgtttttagagacagggtcctgctatttcccaagctggagtgcagtggtgcgatcatggctcactgcagcctcgaactcctgggctcaagcaatcctcctgagtgatcccatttcttaatcagtgtagccccaagaaggctggggctatttaccagggtagaaaaaggagcttacctcccacctttggtcctaagtccctgccccctccccttcacaccataactaggtaacagtttgataactagggaagaaagcagaacagttaagcagccgccacatccccgctggctgggggcctcactccaggaaggggctggactggctgtcctttccagtggcctggctccgctgtgtggatggggagatcggggccagaggcagaaccctggtgaggaagctccagtcctgctctctacccagcccatcttgcctccatggtgcctctggaggcctctgggcctcctctaacaggggctggtgggcaccaagagccaatggagtagacccctggctggtaagggccaagtcccaccggttgcttctgggaaggggtttctaacactagtctgtgtgctgtggttcctggggtgccctccactgccctctgttcagtaacagggccttgctaatcgggttgtcactcaacaaaagtgctttggatttaagttactatcctggctttgcccaacctcagcaacctgtaagactgataatgaaataaatcatgttaatcctaaaaaaaaaaaaaaaaaaaaaaaaaa

SEQ ID NO: 142 - DNA, 6212 bp, Homo sapiens
ggaaaggggaacagttaaatttgtaatttgggttgtgtgaaaacttctttgggcctcataaacaaccacagaaccacaagttgggtagcctggcagtgtcagaagtctgaacccagcatagtggtcagcaggcaggacgaatcacactgaatgcaaaccacagggtttcgcagcgtggtgagcatcaccaacccacagccaaggcggcgctggcttttttttttttttaatctttaacaatttgaatatttgtttttacaaaggtgcattttttaatagggcttggggagtcccagaggtatccagcagaggggagaagaaagagagatgtagggctagaggggtgaggctgaaacagtgacctgtcttggttttcgctccgaaggtaaaagaaatcattgagtcccccgccttcagaagagggtgcattttcaggaggaagcgatggcttcagacagcatatttgagtcatttccttcgtacccacagtgcttcatgagagaatgcatacttggaatgaatccttctagagacgtccacgatgccagcacgagccgccgcttcacgccgccttccaccgcgctgagcccaggcaagatgagcgaggcgttgccgctgggcgccccggacgccggcgctgccctggccggcaagctgaggagcggcgaccgcagcatggtggaggtgctggccgaccacccgggcgagctggtgcgcaccgacagccccaacttcctctgctccgtgctgcctacgcactggcgctgcaacaagaccctgcccatcgctttcaaggtggtggccctaggggatgttccagatggcactctggtcactgtgatggctggcaatgatgaaaactactcggctgagctgagaaatgctaccgcagccatgaagaaccaggttgcaagatttaatgacctcaggtttgtcggtcgaagtggaagagggaaaagcttcactctgaccatcactgtcttcacaaacccaccgcaagtcgccacctaccacagagccatcaaaatcacagtggatgggccccgagaacctcgaagacatcggcagaaactagatgatcagaccaagcccgggagcttgtccttttccgagcggctcagtgaactggagcagctgcggcgcacagccatgagggtcagcccacaccacccagcccccacgcccaaccctcgtgcctccctgaaccactccactgcctttaaccctcagcctcagagtcagatgcaggatacaaggcagatccaaccatccccaccgtggtcctacgatcagtcctaccaatacctgggatccattgcctctccttctgtgcacccagcaacgcccatttcacctggacgtgccagcggcatgacaaccctctctgcagaactttccagtcgactctcaacggcacccgacctgacagcgttcagcgacccgcgccagttccccgcgctgccctccatctccgacccccgcatgcactatccaggcgccttcacctactccccgacgccggtcacctcgggcatcggcatcggcatgtcggccatgggctcggccacgcgctaccacacctacctgccgccgccctaccccggctcgtcgcaagcgcagggaggcccgttccaagccagctcgccctcctaccacctgtactacggcgcctcggccggctcctaccagttctccatggtgggcggcgagcgctcgccgccgcgcatcctgccgccctgcaccaacgcctccaccggctccgcgctgctcaaccccagcctcccgaaccagagcgacgtggtggaggccgagggcagccacagcaactcccccaccaacatggcgccctccgcgcgcctggaggaggccgtgtggaggccctactgaggcgccaggcctggcccggctgggccacgcgggccgccgccttcgcctccgggcgcgcgggcctcctgttcgcgacaagcccgccgggatcccgggccctgggcccggccaccgtcctggggccgagggcgcccgacggccaggatctcgctgtaggtcaggcccgcgcagcctcctgcgcccagaagcccacgccgccgccgtctgctggcgccccggccctcgcggaggtgtccgaggcgacgcacctcgagggtgtccgccggccccagcacccaggggacgcgctggaaagcaaacaggaagattcccggagggaaactgtgaatgcttctgatttagcaatgctgtgaataaaaagaaagattttatacccttgacttaactttttaaccaagttgtttattccaaagagtgtggaattttggttggggtggggggagaggagggatgcaactcgccctgtttggcatctaattcttatttttaatttttccgcaccttatcaattgcaaaatgcgtatttgcatttgggtggtttttatttttatatacgtttatataaatatatataaattgagcttgcttctttcttgctttgaccatggaaagaaatatgattcccttttctttaagttttatttaacttttcttttggacttttgggtagttgtttttttttgttttgttttgtttttttgagaaacagctacagctttgggtcatttttaactactgtattcccacaaggaatccccagatatttatgtatcttgatgttcagacatttatgtgttgataattttttaattatttaaatgtacttatattaagaaaaatatcaagtactacattttcttttgttcttgatagtagccaaagttaaatgtatcacattgaagaaggctagaaaaaaagaatgagtaatgtgatcgcttggttatccagaagtattgtttacattaaactccctttcatgttaatcaaacaagtgagtagctcacgcagcaacgtttttaataggatttttagacactgagggtcactccaaggatcagaagtatggaattttctgccaggctcaacaagggtctcatatctaacttcctccttaaaacagagaaggtcaatctagttccagagggttgaggcgggtgccaataattacatctttggagaggatttgatttctgcccagggatttgctcaccccaaggtcatctgataatttcacagatgctgtgtaacagaacacagccaaagtaaactgtgtaggggagccacatttacataggaaccaaatcaatgaatttaggggttacgattatagcaatttaagggccaccagaagcaggcctcgaggagtcaatttgcctctgtgtgcctcagtggagacaagtgggaaaacatggtcccacctgtgcgagaccccctgtcctgtgctgctcactcaacaacatctttgtgttgctttcaccaggctgagaccctaccctatggggtatatgggcttttacctgtgcaccagtgtgacaggaaagattcatgtcactactgtccgtggctacaattcaaaggtatccaatgtcgctgtaaattttatggcactatttttattggaggatttggtcagaatgcagttgttgtacaactcataaatactaactgctgattttgacacatgtgtgctccaaatgatctggtggttatttaacgtacctcttaaaattcgttgaaacgatttcaggtcaactctgaagagtatttgaaagcaggacttcagaacagtgtttgatttttattttataaatttaagcattcaaattaggcaaatctttggctgcaggcagcaaaaacagctggacttatttaaaacaacttgtttttgagttttcttatatatatattgattatttgttttacacacatgcagtagcactttggtaagagttaaagagtaaagcagcttatgttgtcaggtcgttcttatctagagaagagctatagcagatctcggacaaactcagaatatattcactttcatttttgacaggattccctccacaactcagtttcatatattattccgtattacatttttgcagctaaattaccataaaatgtcagcaaatgtaaaaatttaatttctgaaaagcaccattagcccatttcccccaaattaaacgtaaatgttttttttcagcacatgttaccatgtctgacctgcaaaaatgctggagaaaaatgaaggaaaaaattatgtttttcagtttaattctgttaactgaagatattccaactcaaaaccagcctcatgctctgattagataatcttttacattgaacctttactctcaaagccatgtgtggagggggcttgtcactattgtaggctcactggattggtcatttagagtttcacagactcttaccagcatatatagtatttaattgtttcaaaaaaaatcaaactgtagttgttttggcgataggtctcacgcaacacatttttgtatgtgtgtgtgtgtgcgtgtgtgtgtgtgtgtgtgaaaaattgcattcattgacttcaggtagattaaggtatctttttattcattgccctcaggaaagttaaggtatcaatgagacccttaagccaatcatgtaataactgcatgtgtctggtccaggagaagtattgaataagccatttctactgcttactcatgtccctatttatgatttcaacatggatacatatttcagttctttctttttctcactatctgaaaatacatttccctccctctcttccccccaatatctccctttttttctctcttcctctatcttccaaaccccactttctccctcctccttttcctgtgttctcttaagcagatagcacatacccccacccagtaccaaatttcagaacacaagaaggtccagttcttcccccttcacataaaggaacatggtttgtcagcctttctcctgtttatgggtttcttccagcagaacagagacattgccaaccatattggatctgcttgctgtccaaaccagcaaacttcctgggcaaatcacaatcagtgagtaaatagacagcctttctgctgccttgggtttctgtgcagataaacagaaatgctctgattagaaaggaaatgaatggttccactcaaatgtcctgcaatttaggattgcagatttctgccttgaaatacctgtttctttgggacattccgtcctgatgatttttatttttgttggtttttatttttggggggaatgacatgtttgggtcttttatacatgaaaatttgtttgacaataatctcacaaaacatattttacatctgaacaaaatgcctttttgtttaccgtagcgtatacatttgttttgggatttttgtgtgtttgttgggaattttgtttttagccaggtcagtattgatgaggctgatcatttggctctttttttccttccagaagagttgcatcaacaaagttaattgtatttatgtatgtaaatagattttaagcttcattataaaatattgttaatgcctataactttttttcaatttttttgtgtgtgtttctaaggactttttcttaggtttgctaaatactgtagggaaaaaatgcttctttctaactttgtttattttagactttaaaatgagctacttcttattcacttttgtaaacagctaatagcatggttccaattttttttaagttcactttttttgttctaggggaaatgaatgtgcaaaaaaagaaaaagaactgttggttatttgtgttattctggatgtataaaaatcaatggaaaaaaataaactttcaaattgaaatgacggtataacacatctactgaaaaagcaacgggaaatgtggtcctatttaagccagcccccacctagggtctatttgtgtggcagttattgggtttggtcacaaaacatcctgaaaattcgtgcgtgggcttctttctccctggtacaaacgtatggaatgcttcttaaaggggaactgtcaagctggtgtcttcagccagatgacatgagagaatatcccagaaccctctctccaaggtgtttctagatagcacaggagagcaggcactgcactgtccacagtccacggtacacagtcgggtgggccgcctcccctctcctgggagcattcgtcgtgcccagcctgagcagggcagctggactgctgctgttcaggagccaccagagccttcctctctttgtaccacagtttcttctgtaaatccagtgttacaatcagtgtgaatggcaaataaacagtttgacaagtacata

SEQ ID NO: 143 - DNA, 2233 bp, Homo sapiens
cgagcggcggcggagcaggcatttccagcagtgaggagacagccagaagcaagctattggagctgaaggaacctgagacagaagctagtcccccctctgaattttactgatgaagaaactgaggccacagagctaaagtgacttttcccaaggtcgcccagcgaggacgtgggacttctcagacgtcaggagagtgatgtgagggagctgtgtgaccatagaaagtgacgtgttaaaaaccagcgctgccctctttgaaagccagggagcatcattcatttagcctgctgagaagaagaaaccaagtgtccgggattcagacctctctgcggccccaagtgttcgtggtgcttccagaggcagggctatgctcacattcatggcctctgacagcgaggaagaagtgtgtgatgagcggacgtccctaatgtcggccgagagccccacgccgcgctcctgccaggagggcaggcagggcccagaggatggagagaacactgcccagtggagaagccaggagaacgaggaggacggtgaggaggaccctgaccgctatgtctgtagtggggttcccgggcggccgccaggcctggaggaagagctgaccctcaaatacggagcgaagcacgtgatcatgctgtttgtgcctgtcactctgtgcatgatcgtggtggtagccaccatcaagtctgtgcgcttctacacagagaagaatggacagctcatctacacgacattcactgaggacacaccctcggtgggccagcgcctcctcaactccgtgctgaacaccctcatcatgatcagcgtcatcgtggttatgaccatcttcttggtggtgctctacaagtaccgctgctacaagttcatccatggctggttgatcatgtcttcactgatgctgctgttcctcttcacctatatctaccttggggaagtgctcaagacctacaatgtggccatggactaccccaccctcttgctgactgtctggaacttcggggcagtgggcatggtgtgcatccactggaagggccctctggtgctgcagcaggcctacctcatcatgatcagtgcgctcatggccctagtgttcatcaagtacctcccagagtggtccgcgtgggtcatcctgggcgccatctctgtgtatgatctcgtggctgtgctgtgtcccaaagggcctctgagaatgctggtagaaactgcccaggagagaaatgagcccatattccctgccctgatatactcatctgccatggtgtggacggttggcatggcgaagctggacccctcctctcagggtgccctccagctcccctacgacccggagatggaagactcctatgacagttttggggagccttcataccccgaagtctttgagcctcccttgactggctacccaggggaggagctggaggaagaggaggaaaggggcgtgaagcttggcctcggggacttcatcttctacagtgtgctggtgggcaaggcggctgccacgggcagcggggactggaataccacgctggcctgcttcgtggccatcctcattggcttgtgtctgaccctcctgctgcttgctgtgttcaagaaggcgctgcccgccctccccatctccatcacgttcgggctcatcttttacttctccacggacaacctggtgcggccgttcatggacaccctggcctcccatcagctctacatctgagggacatggtgtgccacaggctgcaagctgcagggaattttcattggatgcagttgtatagttttacactctagtgccatatatttttaagacttttctttccttaaaaaataaagtacgtgtttacttggtgaggaggaggcagaaccagctctttggtgccagctgtttcatcaccagactttggctcccgctttggggagcgcctcgcttcacggacaggaagcacagcaggtttatccagatgaactgagaaggtcagattagggcggggagaagagcatccggcatgagggctgagatgcgcaaagagtgtgctcgggagtggcccctggcacctgggtgctctggctggagaggaaaagccagttccctacgaggagtgttcccaatgctttgtccatgatgtccttgttattttattgcctttagaaactgagtcctgttcttgttacggcagtcacactgctgggaagtggcttaatagtaatatcaataaatagatgagtcctgttagaaaaa

SEQ ID NO: 144 - DNA, 8833 bp, Homo sapiens
cgccccccacgccctgggccccggagggccgcagccatgagtgaaatgtccagctttcttcacatcggggacatcgtctccctgtacgccgagggctccgtcaatggcttcatcagcactttggggctggtggatgaccgctgtgtggtggagcccgcggccggggacctggacaacccccctaagaagttccgtgactgcctcttcaaggtgtgccccatgaaccgctactcggcccagaagcagtactggaaggccaagcagactaagcaggacaaggagaagatcgctgatgtggtgttgctgcagaagctgcagcatgcggcgcagatggagcagaagcaaaatgacacggagaacaagaaggtgcatggggatgtcgtgaagtatggcagtgtgatccagctcctgcacatgaagagcaacaagtacctgacagtgaacaagcggcttccggccttgctggagaagaacgccatgcgggtgactctggatgccacaggcaacgagggttcctggctcttcatccagcccttctggaagctgcggagcaacggggacaacgtggtcgtgggggacaaggtgatcctgaatcctgtcaatgccgggcagcctctgcatgccagcaattacgagctcagcgacaacgccggctgcaaggaggtcaattctgtgaactgcaacaccagctggaagatcaacctgtttatgcagtttcgggaccacctggaggaggtgttgaaagggggagacgtggtgcggctgttccatgcggagcaggagaagttcctgacgtgtgacgagtacaagggcaagctgcaggtgttcctgcgaactacactgcgccagtctgccacctcggccaccagctccaatgctctctgggaggtggaggtggtccaccacgacccctgccgtggaggagctgggcactggaatggcttgtaccgcttcaagcacctggctacaggcaactacctggctgctgaggagaaccccagttacaaaggtgatgcctcagatcccaaggcagcaggaatgggggcacagggccgcacaggccgcaggaatgctggggagaagatcaagtactgcctggtggctgtgcctcatggcaatgacatcgcctctctctttgagctggaccccaccaccttgcagaaaaccgactctttcgtgccccggaactcgtacgtccggctgcggcacctctgcaccaacacgtggattcagagcaccaatgtgcccattgacatcgaggaggagcggcccatccggctcatgctgggcacctgccccaccaaggaggacaaggaggcctttgccatcgtgtcagtgcccgtgtctgagatccgagacctggactttgccaatgacgccagctccatgctggccagtgccgtggagaaactcaacgagggcttcatcagccagaatgaccgcaggtttgtcatccagctgctggaagacctggtgttctttgtcagcgatgtccccaacaatgggcagaatgtcctggacatcatggtcactaagcccaaccgggaacggcagaagctgatgagggagcagaacatcctcaaacaggtctttggcattctgaaggtcccgttccgtgagaaggggggtgaaggtcccctggtgcggctggaggagctgtcagaccagaagaacgccccctaccagcacatgttccgcctgtgctaccgtgtgttgcggtattcccaggaggactaccgcaagaaccaggagcacattgccaagcagtttgggatgatgcagtcccagattggctacgacatcctggccgaggacaccatcactgccctgctgcacaacaaccgcaagctcctggaaaagcacatcaccaagaccgaggtggagaccttcgtcagccttgtgcgcaagaaccgggagcccaggttcctggactacctctctgacctgtgtgtgtccaaccacatcgccatccccgtcacccaagagctcatctgcaagtgtgtgctggaccccaagaacagtgacattctcatccggaccgagcttcggcccgtgaaggagatggcccaatcccacgagtacctgagcatcgagtactcagaagaggaagtgtggctcacgtggactgacaagaataacgagcatcatgagaagagtgtgaggcagctggcccaggaggcgcgggccggcaacgcccacgacgagaatgtgctcagctactacaggtaccagctgaagctctttgcccgcatgtgcttggaccgccagtacttggccatcgacgagatctcccagcagctgggcgtggacctgattttcctgtgcatggcagacgagatgctgccctttgacctgcgcgcctccttctgccacctgatgctgcacgtgcacgtggaccgtgacccccaggagctggtcacgccggtcaagtttgcccgtctctggactgagatccccacagccatcaccatcaaggactatgattccaacctcaacgcgtcccgagatgacaagaagaacaagtttgccaacaccatggagttcgtggaggactacctcaacaatgtagtcagcgaggccgtgccctttgccaacgaggagaagaacaagctcacttttgaggtggtcagcctggcgcacaatctcatctacttcggcttctacagcttcagcgagctgctgcggctcactcgcacactgctgggcatcatcgactgtgtgcaggggcccccggccatgctgcaggcctatgaggaccccggtggcaagaatgtgcggcggtccatccagggcgtggggcacatgatgtccaccatggtgctgagccgcaagcagtccgtcttcagtgcccccagcctgtctgctggggccagtgctgctgagccgctggacagaagcaagtttgaggagaatgaggacattgtggtgatggagaccaagctgaagatcctggaaatccttcagttcatcctcaacgtccgcctggattaccgcatatcctacctgctgtctgtcttcaagaaggagtttgtggaggtgtttcccatgcaggacagtggggctgatggcacagcccctgccttcgactctaccactgccaacatgaacctggatcgcatcggggagcaggcggaggccatgtttggagtggggaagacaagcagcatgctggaggtggatgacgagggcggccgcatgttcctgcgcgtgctcatccacctcaccatgcacgactatgcgccactggtctcgggtgccctgcagctgctcttcaagcacttcagccagcgccaggaggccatgcacaccttcaagcaggttcagctgctgatctcagcgcaggacgtggagaactacaaggtgatcaagtcggagctggaccggctgcggaccatggtggagaagtcagagctgtgggtggacaagaagggcagtggcaagggtgaggaggtggaggcaggcaccgccaaggacaagaaagagcgtcccacggacgaggagggctttctgcacccaccaggggagaaaagcagtgagaactaccagatcgtcaagggcatcctggaaaggctgaacaagatgtgcggggttggggagcaaatgaggaagaagcagcaacggctgctgaagaacatggatgcccacaaggtcatgctggacctgctgcagatcccctatgacaagggtgatgccaagatgatggagatcctgcgctacacgcaccagttcctgcagaagttctgtgcagggaaccccggcaaccaggccctgctgcacaaacacctgcacctcttcctcacgccagggctcctggaggcagagaccatgcagcacatcttcctgaacaactatcagctctgctccgagatcagcgagcctgtgttgcagcacttcgtgcacctgctggccacgcacgggcgccatgtgcagtacctggacttcctgcacaccgtcattaaggccgagggcaagtacgtcaagaagtgccaggacatgatcatgactgagctgaccaatgcaggtgacgatgtggtcgtgttctacaatgataaggcatcgctggcccacctgctggacatgatgaaggccgcccgcgacggcgtggaggaccacagccccctcatgtaccacatttccctggtggacctgctggccgcctgtgccgagggcaaaaacgtctacactgagatcaagtgcacctccctcgtgccgctggaggacgtggtgtctgtggtgacgcatgaggactgcatcactgaggtgaaaatggcctatgtgaacttcgtgaaccactgctacgtggacacggaggtggagatgaaggagatctacaccagcaaccacatctggacgctctttgagaacttcaccctggacatggctcgggtctgcagcaagcgtgagaagcgcgtggctgaccccaccttggagaagtacgtgctgagcgttgtgctggacaccatcaacgccttcttcagctccccattctctgagaacagcacttccctgcagacacaccagccggttgtggtgcagctgctgcagtctaccacacgcctcctcgagtgtccgtggctacagcagcagcacaagggctccgtggaggcctgcatccggaccctcgccatggtggccaagggccgggccatcttgctgcccatggacctggatgcccacatcagctcgatgctcagcagtggagccagctgtgcagctgccgcccagcggaacgcctccagctacaaggcaaccacgcgggccttcccccgcgtcacccccaccgccaaccagtgggactacaagaacatcattgagaagctgcaggacatcatcacagccctggaggagcggctgaagcccctggtacaggctgagctgtccgtgctggtggatgtcctgcactggcctgagctgctcttcctggagggcagtgaggcctaccagcgctgcgagagtgggggcttcctgtccaagctgatccagcacaccaaggacctcatggagtcggaggagaagctgtgcatcaaggtgctgcggaccctgcagcagatgctcgtcaagaagaccaagtacggggaccggggcaaccagctgcgcaagatgctgctgcaaaactacctccagaaccggaagtccacctcgcggggggaccttcccgaccccataggcactggcctggacccagactggtcggcaatcgcagccacccagtgccggctggacaaggagggggccaccaagttggtatgcgacctcatcaccagcaccaagaacgagaagatcttccaggagagcatcggcctggccatccacctgctggatggtggcaacacagagatccagaaatccttccacaacctgatgatgagtgacaagaagtcagagcgcttcttcaaggtgctgcacgaccgcatgaagcgggcccagcaggagaccaagtccacggtggcagtcaacatgaatgacctgggcagccagccacatgaggaccgcgagccagtcgaccccaccaccaaaggccgcgtggcctccttctcgatacctggctcctcatcccgctactcgctgggccccagcctgcgccgggggcacgaggtgagcgaacgtgtgcagagcagtgagatgggcacatccgtgctcatcatgcagcccatcctgcgctttctgcagctgctgtgtgagaaccacaaccgggacctgcagaacttcctgcgctgtcagaacaacaaaaccaactacaacttggtatgcgagacgctgcagttcctggacatcatgtgcggcagcaccacgggcggcctggggctgctggggctctacatcaatgaggacaacgtgggcctcgtcatccagaccttggagaccctcactgagtactgccagggcccctgccatgagaaccagacttgcattgtgactcacgagtccaatggcatagacatcatcaccgcactgatcctcaatgacatcagccccctgtgcaagtaccgcatggatctggtgctgcagctcaaggacaatgcctccaagctgctcctggctctgatggagagccggcatgacagtgaaaatgctgagcgaatcctcatcagcctgcggccccaggagctggtggacgtcatcaagaaggcctacctgcaggaggaagagcgtgagaactcggaggtgagcccacgtgaagtgggccataacatctatatcctggcgctgcagctctccaggcacaataaacagctgcagcacctgctgaagccggtgaagcgcattcaagaggaggaggccgagggtatctcttccatgctcagcctcaacaacaagcagctgtcacagatgctcaagtcctcagcgccagcacaggaggaggaggaagaccccctggcctactatgagaaccacacgtcccagatcgagattgtgcggcaggaccgcagcatggagcagatcgtgttcccagtgcccggcatctgccagttcctgacggaggaaaccaagcaccggctcttcaccactactgagcaggacgagcagggcagcaaagtgagcgacttcttcgaccagtcctccttcctgcacaacgagatggagtggcagcgcaacgtccgcagcatgccgctgatctactggttctcccgccgcatgaccctgtggggcagcatctccttcaacctggccgtgtttatcaacatcatcattgccttcttctacccttacatggagggcgcgtccacaggcgtgctggactcccctctcatctcattgctcttctggatcctcatctgcttctccatcgcggccctgttcaccaagcgctacagcatccgccccctcatcgtggcgctcatcctgcgctccatctactatctgggcatcgggcccacactcaacatcctgggtgccctcaatctgaccaacaagatcgtgtttgtggtgagcttcgtgggcaaccgtggcaccttcatccggggctataaggccatggtcatggacatggaattcctctaccacgtgggctacatcctgaccagtgtcctgggcctctttgctcatgagctgttctacagcatcctgctctttgacctcatctaccgcgaggagacgctgttcaacgtcatcaagagtgtgacccgcaatggccgctccatcctgctgacagccctgctggccctcatcctggtctacctcttctccatcgtcggcttcctcttcctcaaggatgacttcattctcgaggtcgaccggctgcccaacaaccactccacagccagccccctggggatgccacatggagctgctgcatttgtggacacctgcagtggggacaagatggactgtgtctcagggctctcggtgcctgaggtcctggaagaggacagggagctggacagcacagagcgggcctgtgacactctgttgatgtgcatcgtcactgtcatgaaccatgggctacgcaacggtggtggcgtgggcgacattctccgcaagccctccaaagatgagtctctcttcccagcccgagtggtctatgacctcctgttcttcttcatcgtcatcatcattgtgctgaacctcatctttggggtaatcatcgacaccttcgctgacctgcgtagtgagaagcagaagaaggaggagattcttaagacgacatgcttcatctgtggtctggagagggacaagtttgataacaagacagtgtcatttgaggaacacatcaagctggagcacaacatgtggaactacttgtacttcattgtgctggtccgcgtgaagaacaagaccgactacacgggccctgagagctacgtggcccagatgatcaagaacaagaacctggactggttcccccggatgcgggccatgtcccttgtcagcaatgagggcgagggggagcagaatgagattcggattctccaggacaagctcaactccaccatgaagctggtgtcccacctcactgcccagctcaacgagctcaaggagcagatgacggagcagcggaaacgcaggcaacgcctaggctttgtggatgtccagaactgcattagccgctgaggagagccaccgaaggccccaacaggggatgctcatcactggagactgcgactgggaagaacactgccccctccctcgggttgggtggcccagccagctggccagcctccactcccactctgccagacaccctgacacccacccaggctttgaagagcatggagggggagcctcagagctgacagtcctgcttagagcccttaaaaagacttgaaagttcactgggactcagtttaccttaatgccttagcagaagataaatcctacctagagacctttgttccttaaagcaataactgacaactctttgtagtcctccttgtgggtagttaagagtggggtcacccctttaactccaagcactacattttggcggctgcggcctctgggggaggtggcagttatgctgttactagtgattttagggctttgttatttaacttatttcaagggtgctgtgctcagccctgcccatggctgtgcagctccctccgtgcctcagatctgctgtagccagtgcagacctcactgtcgtgtccatgccacccccggcatggctccaggtggcctggtgactccatgatggacgatcttgctcccaggacctgcctcttcccaggcttcctggggaagagttgtacgcccaggcaacaagggctgagctgcgcttgcgtggctgtttcatgaccgcttgtttttctccttttggtgtaatgttttacaaatcctttggcctgagaactaatatgttaattgccttaaataaattaatagaaatcta

SEQ ID NO: 145 - DNA, 1465 bp, Homo sapiens
tgggccctttgaccctgcacaatgacctttgcatcagccaaactcattgccatgacaactctttgtactgtgtccgtgccacagatctgttggtcacattgttaatagtaaaggggacaagttggagacggtcaatttttacattttttgttgcaattttttcttcaatggttgtaagtagttttttttttttttaataataaaggggttcactagttaatactctagaaatatctgtgtgttgcaattcaaatgtatgttgagattgtgaaaagcgcttcagtgccactagcttaccggtacactagactaagcccttgatgacttattgcatgatacagtaccaggaacaacaggtggcctaaatacatgaaaagcagtgtaagctagtgacactaaagccagtcttgtattactgtatttttgacagaatggttttgaaaactgtgctacagggactgatgtggcaaatatatctctttatgcagaaggaagtctttttttttctttttttttttttttaagaagtatggctttttatgcatccttcatcgagggcattggagttgcatggactgataaaagttgatgcaaaacaagaaagaaacaaacaaaaaaaaaaaaaccagcaaaatgtttaccaaaaaactcaaacaaatgagcagtgcctgttcaatttcacagtctctgttgagttcagttgtaaatatgtttcaaatgacattttcttgggaaaaaaaatctctacaacattgtagaatgtgaggggtaactacatcccaggcataggtttctcaaagctgcagtagattatgtcttcatcaagctgttaatttgtgcttatatcatatagaacttttagcatcctgggaagagctgcccccacctcaatgatatttctctgagaacaacttttgtaggactgtgtgtttctttagatacatttagtacaactgtaggtgacgagtagtcagttattgcttgctagctacacaccagggttgatccattttaaaacttttggcattttgtcctcatgggccataaatacagaaccttgtattttaattaaatttttttacaaaaggaggcacatgcacaatctccatgtaacaaacctttagcagtaggatgtattatacgacagttacttaatttctagagttcaggcctctgggatcaaccccagactgggccagaatgttagtgaaggttttattgtgcccggttggaggataacgttctttgggtactttttgtgggttgcaaatgaactcaattgccacaagttttaaactggtgtaaatcaagcttgacttaatgtgattgttactgttatatccagcctatactgctagcagctgctcatactgcagtcaattactggaagcggatatatttcctatgcaaaaactgtttaaacaataaaatgagctatgctacagaaaaaaaaaaaaaaaaaaaa

SEQ ID NO: 146 - DNA, 2131 bp, Homo sapiens
ctctttataatttagtttccatagaagttatatgtgcatttaaaaaaattcaatgctggagcgaccgtgtctggggagccgagccccgcttctcgctgcggtgagcccggactggggcacgcactgcgcagactccccgctgcagtgggcggagtcccacaggccccgcccctcctcccaccctcgttcagcctgtccagacagaagctggggcccagcggaggtagcagcagacgcctgagagcgaggccgaggccctcagggtttggagaccctgacacacccaccttctcacctgggctctgcgtatcccccagccttgagggaagatgaagcctaaactgatgtaccaggagctgaaggtgcctgcagaggagcccgccaatgagctgcccatgaatgagattgaggcgtggaaggctgcggaaaagaaagcccgctgggtcctgctggtcctcattctggcggttgtgggcttcggagcctgatgactcagctgtttctatgggaatacggcgacttgcatctctttgggcccaaccagcgcccagccccctgctatgacccttgcgaagcagtgctggtggaaagcattcctgagggcctggacttccccaatgcctccacggggaacccttccaccagccaggcctggctgggcctgctcgccggtgcgcacagcagcctggacatcgcctccttctactggaccctcaccaacaatgacacccacacgcaggagccctctgcccagcagggtgaggaggtcctccggcagctgcagaccctggcaccaaagggcgtgaacgtccgcatcgctgtgagcaagcccagcgggccccagccacaggcggacctgcaggctctgctgcagagcggtgcccaggtccgcatggtggacatgcagaagctgacccatggcgtcctgcataccaagttctgggtggtggaccagacccacttctacctgggcagtgccaacatggactggcgttcactgacccaggtcaaggagctgggcgtggtcatgtacaactgcagctgcctggctcgagacctgaccaagatctttgaggcctactggttcctgggccaggcaggcagctccatcccatcaacttggccccggttctatgacacccgctacaaccaagagacaccaatggagatctgcctcaatggaacccctgctctggcctacctggcgagtgcgcccccacccctgtgtccaagtggccgcactccagacctgaaggctctactcaacgtggtggacaatgcccggagtttcatctacgtcgctgtcatgaactacctgcccactctggagttctcccaccctcacaggttctggcctgccattgacgatgggctgcggcgggccacctacgagcgtggcgtcaaggtgcgcctgctcatcagctgctggggacactcggagccatccatgcgggccttcctgctctctctggctgccctgcgtgacaaccatacccactctgacatccaggtgaaactctttgtggtccccgcggatgaggcccaggctcgaatcccatatgcccgtgtcaaccacaacaagtacatggtgactgaacgcgccacctacatcggaacctccaactggtctggcaactacttcacggagacggcgggcacctcgctgctggtgacgcagaatgggaggggcggcctgcggagccagctggaggccattttcctgagggactgggactccccttacattcatgaccttgacacctcagctgacagcgtgggcaacgcctgccgcctgctctgaggcccgatccagtgggcaggccaaggcctgctgggcccccgcggacccaggtgctctgggtcacggtccctgtccccgcacccccgcttctgtctgccccattgtggctcctcaggctctctcccctgctctcccacctctacctccacccccaccggcctgacgctgtggccccgggacccagcagagctgggggagggatcagcccccaaagaaatgggggtgcatgctggcctgccccctggcccacccccactttccagggcaaaaagggcccagggttataataagtaaataacttgtctgtaaaaaaaaaaaaaaaaaaaaaaa

SEQ ID NO: 147 - DNA, 4382 bp, Homo sapiens
gaattccgatggcagaagagaatccacctgcaattcctggctggcggttggcatctaagcaggcatcaggatgttgggctgggtccagagggtgctgcctcagcccccagggacccctcggaagaccaagatgcaggaggaagaggaagtggaaccagagccagagatggaggcggaggtggaaccagaaccgaatcctgaggaggccgagacagagtccgagtccatgccccccgaagagtcattcaaggaggaggaagtggctgtggcagacccaagccctcaggagaccaaggaggctgcccttacttccaccatatccctccgggcccagggcgctgagatttctgaaatgaatagtcccagccacagggtactgacctggctcatgaagggtgtagagaaggtgatcccgcagcctgttcacagcatcacggaggacccggctcagatcctggggcatggcagcactggggacacagggtgcacagatgaacccaatgaggcccttgaggcccaagacactaggcctgggctgcggctgcttctgtggctggagcagaatctggaaagagtgcttcctcagccccccaaatcctctgaggtctggagagatgagcctgcagttgctacagcgcctccaggacgcccccaggaaatggggcccaagctgcaggcccgggagaccccctccctgcccacacccatccccctgcagcccaaggaggaacccaaggaggcaccagctccagagccccagcccggctcccaggcccagacctcctccctgccaccaaccagggaccctgccaggctggtggcatgggtcctgcacaggctggagatggccttgccgcagccagtgctacatgggaaaataggggaacaggagcctgactcccctgggatatgtgatgtgcagaccatcagcatccttcctggaggacaagtggagcctgaccttgtcctagaggaggttgaaccgccctgggaggatgcccaccaggatgtcagtaccagcccacagggtacagaggtggttccagcttatgaagaagagaacaaagctgtggagaagatgcccagagagctgtcccggattgaagaggagaaagaagatgaggaggaggaagaggaagaggaggaggaggaggaagaggaggaggtgactgaggtgctgctggatagctgtgtggtgtcgcaggtgggcgtgggccagagtgaagaagacgggacccggccccagagcacttcagatcagaagctgtgggaggaagttggggaggaggccaagaaggaggctgaagagaaggccaaggaggaggccgaggaggtggctgaagaggaggctgaaaaggagccccaggactgggcggagaccaaggaggagcctgaggctgaggccgaggctgccagttcaggagtgcctgccacgaaacagcacccagaagtgcaggtggaagatactgatgctgatagctgccccctcatggcagaagagaatccaccctcaaccgtgttgccgccaccatctcctgccaaatcagacacccttatagtcccaagctcagcctcggggacacacaggaagaagctgccctctgaggatgatgaggctgaagagctcaaggcgttgtcaccagcagagtccccagtggttgcctggtctgaccccaccaccccgaaggacactgatggccaggaccgtgcggcctccacggccagcacaaatagcgccatcatcaacgaccggctccaggagctggtgaagctcttcaaggagcggacagagaaagtgaaggagaaactcattgaccctgacgtcacctctgatgaggagagccccaagccctccccagccaagaaagccccagagccagctccagacacaaagcccgctgaagccgagccagtggaagaggagcactattgcgacatgctctgctgcaagttcaaacaccgcccctggaagaagtaccagtttccccagagcattgacccgctgaccaacctgatgtatgtcctatggctgttcttcgtggtgatggcctggaattggaactgttggctgattcccgtgcgctgggccttcccctaccagaccccggacaacatccaccactggctgctgatggattacctatgcgacctcatctacttcctggacatcaccgtgttccagacacgcctgcagtttgtcagaggcggggacatcattacggacaaaaaggacatgcgaaataactacctgaagtctcgccgcttcaagatggacctgctcagcctcctgcccttggattttctctatttgaaagtcggtgtgaaccccctcctccgcctgccccgctgtttaaagtacatggccttcttcgagtttaacagccgcctggaatccatcctcagcaaagcctacgtgtacagggtcatcaggaccacagcctaccttctctacagcctgcatttgaattcctgtctttattactgggcatcggcctatcagggcctcggctccactcactgggtttacgatggcgtgggaaacagttatattcgctgttactactttgctgtgaagaccctcatcaccatcggggggctgcctgaccccaagacactctttgaaattgtcttccagctgctgaattatttcacgggcgtctttgctttctctgtgatgatcggacagatgagagatgtggtaggggccgccaccgcgggacagacctactaccgcagctgcatggacagcacggtgaagtacatgaatttctacaagatccccaagtccgtgcagaaccgcgtcaagacctggtacgagtacacctggcactcgcaaggcatgctggatgagtcagagctgatggtgcagcttccagacaagatgcggctggacctcgccatcgacgtgaactacaacatcgttagcaaagtcgcactctttcagggctgtgaccggcagatgatctttgacatgctgaagaggcttcgctctgttgtctacctgcccaacgactatgtgtgcaagaagggggagatcggccgtgagatgtacatcatccaggcagggcaagtgcaggtcttgggcggccctgatgggaaatctgtgctggtgacgctgaaagctggatctgtgtttggagaaataagcttgctggctgttgggggcgggaaccggcgcacggccaacgtggtggcgcacgggtttaccaacctcttcatcctggataagaaggacctgaatgagattttggtgcattatcctgagtctcagaagttactccggaagaaagccaggcgcatgctgagaagcaacaataagcccaaggaggagaagagcgtgctgatccttccaccccgggcgggcaccccaaagctcttcaacgctgccctcgctatgacaggaaagatgggtggcaagggggcaaaaggcggcaaacttgctcacctccgggcccggctcaaagaactggccgcgctggaggcggctgcaaagcagcaagagttggtggaacaggccaagagctcgcaagacgtcaagggagaggaaggctccgccgccccagaccagcacacgcacccaaaggaggccgccaccgacccacccgcgccccggacgccccccgagcccccggggtctccaccgagctctccaccgcctgcctcccttgggaggccggagggagaggaggaggggccggccgagcccgaagagcactcggtgaggatctgcatgagcccgggcccggagccgggagagcagatcctgtcggtgaagatgccggaggaaagggaggagaaggcggagtaaggtggggtgaggcggatcccgcgcgcagttccagcaggtgtgtccccagcgcccgctgcgcccctcgccccagcgccccaccttcccccacggctcaagagaagatgcttttccgtagtcgtgacctcagtggctgcagctctgaccgtcccgccagcacgccagccccgactcagctcctcgcggggctgggcctgagctcgacaagttgcatcaagtgttcgagtccctgagctctcactatcatttgagagccctaccttttcctgactgttcctctttttaagaacaaaatgattttccacttttaaagttcatgggtgagggataaaatgaggctccaatacatgggaagctttgctgaaaaagtaaagtgttattgaatgtgtggggtttcccctcaggaatttgtctaacacatttcaaggatagaaaatacttcactgccgggcatggtggctcatgcctataatcccagtgctttgggaagccgaagcaggaggatcactggaggccaagagttggagagcagactgggcaacatagcgagacctcatctcaaaccggaattcgg

SEQ ID NO: 148 - DNA, 3069 bp, Homo sapiens
tgtttccgctgcatccagacttcctcaggcggtggctggaggctgcgcatctggggctttaaacatacaaagggattgccaggacctgcggcggcggcggcggcggcgggggctggggcgcgggggccggaccatgagccgctgagccgggcaaaccccaggccaccgagccagcggaccctcggagcgcagccctgcgccgcggaccaggctccaaccaggcggcgaggcggccacacgcaccgagccagcgacccccgggcgacgcgcggggccagggagcgctacgatggaggcgctaatggcccggggcgcgctcacgggtcccctgagggcgctctgtctcctgggctgcctgctgagccacgccgccgccgcgccgtcgcccatcatcaagttccccggcgatgtcgcccccaaaacggacaaagagttggcagtgcaatacctgaacaccttctatggctgccccaaggagagctgcaacctgtttgtgctgaaggacacactaaagaagatgcagaagttctttggactgccccagacaggtgatcttgaccagaataccatcgagaccatgcggaagccacgctgcggcaacccagatgtggccaactacaacttcttccctcgcaagcccaagtgggacaagaaccagatcacatacaggatcattggctacacacctgatctggacccagagacagtggatgatgcctttgctcgtgccttccaagtctggagcgatgtgaccccactgcggttttctcgaatccatgatggagaggcagacatcatgatcaactttggccgctgggagcatggcgatggatacccctttgacggtaaggacggactcctggctcatgccttcgccccaggcactggtgttgggggagactcccattttgatgacgatgagctatggaccttgggagaaggccaagtggtccgtgtgaagtatggcaacgccgatggggagtactgcaagttccccttcttgttcaatggcaaggagtacaacagctgcactgatactggccgcagcgatggcttcctctggtgctccaccacctacaactttgagaaggatggcaagtacggcttctgtccccatgaagccctgttcaccatgggcggcaacgctgaaggacagccctgcaagtttccattccgcttccagggcacatcctatgacagctgcaccactgagggccgcacggatggctaccgctggtgcggcaccactgaggactacgaccgcgacaagaagtatggcttctgccctgagaccgccatgtccactgttggtgggaactcagaaggtgccccctgtgtcttccccttcactttcctgggcaacaaatatgagagctgcaccagcgccggccgcagtgacggaaagatgtggtgtgcgaccacagccaactacgatgacgaccgcaagtggggcttctgccctgaccaagggtacagcctgttcctcgtggcagcccacgagtttggccacgccatggggctggagcactcccaagaccctggggccctgatggcacccatttacacctacaccaagaacttccgtctgtcccaggatgacatcaagggcattcaggagctctatggggcctctcctgacattgaccttggcaccggccccacccccacactgggccctgtcactcctgagatctgcaaacaggacattgtatttgatggcatcgctcagatccgtggtgagatcttcttcttcaaggaccggttcatttggcggactgtgacgccacgtgacaagcccatggggcccctgctggtggccacattctggcctgagctcccggaaaagattgatgcggtatacgaggccccacaggaggagaaggctgtgttctttgcagggaatgaatactggatctactcagccagcaccctggagcgagggtaccccaagccactgaccagcctgggactgccccctgatgtccagcgagtggatgccgcctttaactggagcaaaaacaagaagacatacatctttgctggagacaaattctggagatacaatgaggtgaagaagaaaatggatcctggctttcccaagctcatcgcagatgcctggaatgccatccccgataacctggatgccgtcgtggacctgcagggcggcggtcacagctacttcttcaagggtgcctattacctgaagctggagaaccaaagtctgaagagcgtgaagtttggaagcatcaaatccgactggctaggctgctgagctggccctggctcccacaggcccttcctctccactgccttcgatacaccgggcctggagaactagagaaggacccggaggggcctggcagccgtgccttcagctctacagctaatcagcattctcactcctacctggtaatttaagattccagagagtggctcctcccggtgcccaagaatagatgctgactgtactcctcccaggcgccccttccccctccaatcccaccaaccctcagagccacccctaaagagatcctttgatattttcaacgcagccctgctttgggctgccctggtgctgccacacttcaggctcttctcctttcacaaccttctgtggctcacagaacccttggagccaatggagactgtctcaagagggcactggtggcccgacagcctggcacagggcagtgggacagggcatggccaggtggccactccagacccctggcttttcactgctggctgccttagaacctttcttacattagcagtttgctttgtatgcactttgtttttttctttgggtcttgttttttttttccacttagaaattgcatttcctgacagaaggactcaggttgtctgaagtcactgcacagtgcatctcagcccacatagtgatggttcccctgttcactctacttagcatgtccctaccgagtctcttctccactggatggaggaaaaccaagccgtggcttcccgctcagccctccctgcccctcccttcaaccattccccatgggaaatgtcaacaagtatgaataaagacacctactgagtggc

SEQ ID NO: 149 - DNA, 5347 bp, Homo sapiens
acccccaagatccccctaaacctgcacctccatcacgacccattcaggagcctccaggagcccagacaccagccccccaccatgggcagcaaggagcgcttccactggcagagccacaacgtgaagcagagcggcgtggatgacatggtgcttcttccccagatcaccgaagacgccattgccgccaacctccggaagcgcttcatggacgactacatcttcacctacatcggctctgtgctcatctctgtaaaccccttcaagcagatgccctacttcaccgaccgtgagatcgacctctatcagggcgcggcccagtatgagaatcccccgcacatctacgccctcacggacaacatgtaccggaacatgcttatcgactgtgagaaccagtgtgtcatcattagtggagagagtggagctgggaagacagtggcagccaaatatatcatgggctacatctccaaggtgtctggcggaggcgagaaggtccagcacgtcaaagatatcatcctgcagtccaacccgctgctcgaggccttcggcaacgccaagactgtgcgcaacaacaattccagccgctttggcaagtactttgagatccagttcagccgaggtggggagccagatgggggcaagatctccaacttcttgctggagaagtcccgcgtggtcatgcaaaatgaaaatgagaggaacttccacatctactaccagctgctggaaggggcctcccaggagcaaaggcagaacctgggcctcatgacaccggactactattactacctcaaccaatcggacacctaccaggtggacggcacggacgacagaagcgactttggtgagactctgagtgttatgcaggttattgggatcccgcccagcatccagcagctggtcctgcagctcgtggcggggatcttgcacctggggaacatcagtttctgtgaagacgggaattacgcccgagtggagagtgtggacctcctggcctttcccgcctacctgctgggcattgacagcgggcgactgcaggagaagctgaccagccgcaagatggacagccgctggggcgggcgcagcgagtccatcaatgtgaccctcaacgtggagcaggcagcctacacccgtgatgccctggccaaggggctctatgcccgcctcttcgacttcctcgtggaggccatcaaccgtgctatgcagaaaccccaggaagagtacagcatcggtgtgctggacatttacggcttcgagatcttccagaaaaatggcttcgagcagttttgcatcaacttcgtcaatgagaagctgcagcaaatctttatcgaacttaccctgaaggccgagcaggaggagtatgtgcaggaaggcatccgctggactccaatccagtacttcaacaacaaggtcgtctgtgacctcatcgaaaacaagctgagccccccaggcatcatgagcgtcttggacgacgtgtgcgccaccatgcacgccacgggcgggggagcagaccagacactgctgcagaagctgcaggcggctgtggggacccacgagcatttcaacagctggagcgccggcttcgtcatccaccactacgctggcaaggtctcctacgacgtcagcggcttctgcgagaggaaccgagacgttctcttctccgacctcatagagctgatgcagaccagtgagcaggccttcctccggatgctcttccccgagaagctggatggagacaagaaggggcgccccagcaccgccggctccaagatcaagaaacaagccaacgacctggtggccacactgatgaggtgcacaccccactacatccgctgcatcaaacccaacgagaccaagaggccccgagactgggaggagaacagagtcaagcaccaggtggaatacctgggcctgaaggagaacatcagggtgcgcagagccggcttcgcctaccgccgccagttcgccaaattcctgcagaggtatgccattctgacccccgagacgtggccgcggtggcgtggggacgaacgccagggcgtccagcacctgcttcgggcggtcaacatggagcccgaccagtaccagatggggagcaccaaggtctttgtcaagaacccagagtcgcttttcctcctggaggaggtgcgagagcgaaagttcgatggctttgcccgaaccatccagaaggcctggcggcgccacgtggctgtccggaagtacgaggagatgcgggaggaagcttccaacatcctgctgaacaagaaggagcggaggcgcaacagcatcaatcggaacttcgtcggggactacctggggctggaggagcggcccgagctgcgtcagttcctgggcaagagggagcgggtggacttcgccgattcggtcaccaagtacgaccgccgcttcaagcccatcaagcgggacttgatcctgacgcccaagtgtgtgtatgtgattgggcgagagaaagtgaagaagggacctgagaagggccaggtgtgtgaagtcttgaagaagaaagtggacatccaggctctgcggggagtctccctcagcacgcgacaggacgacttcttcatcctccaagaggatgccgccgacagcttcctggagagcgtcttcaagaccgagtttgtcagccttctgtgcaagcgcttcgaggaggcgacgcggaggcccctgcccctcaccttcagcgacacactacagtttcgggtgaagaaggagggctggggcggtggcggcacccgcagcgtcaccttctcccgcggcttcggcgacttggcagtgctcaaggttggcggtcggaccctcacggtcagcgtgggcgatgggctgcccaagagctccaagcctacgcggaagggaatggccaagggaaaacctcggaggtcgtcccaagcccctacccgggcggcccctgcgccccccagaggcatggatcgcaatggggtgcccccctctgccagagggggccccctgcccctggagatcatgtctggagggggcacccacaggcctccccggggccctccgtccacatccctgggagccagcagacgaccccgggcacgtccgccctcagagcacaacacagaattcctcaacgtgcctgaccagggcatggccggcatgcagaggaagcgcagcgtggggcaacggccagtgcctggtgtgggccgacccaagccccagcctcggacacatggtcccaggtgccgggccctataccagtacgtgggccaagatgtggacgagctgagcttcaacgtgaacgaggtcattgagatcctcatggaagatccctcgggctggtggaagggccggcttcacggccaggagggccttggcagcccctcagcaagaagccctgcctgatgagacagaggtggtggaagaaactgtggcagaggtgactgaggtatctgtgggagctaatcctgtccaggtggaagtaggagaatttgatggtggtgcagaggaaaccgaagaggaggtggtggcggaaaatccctgccagaaccaccactgcgaacacggcaaggtgtgcgagctggatgagaacaacacccccatgtgcgtgtgccaggaccccaccagctgcccagcccccattggcgagtttgagaaggtgtgcagcaatgacaacaagaccttcgactcttcctgccacttctttgccacaaagtgcaccctggagggcaccaagaagggccacaagctccacctggactacatcgggccttgcaaatacatccccccttgcctggactctgagctgaccgaattccccctgcgcatgcgggactggctcaagaacgtcctggtcaccctgtatgagagggatgaggacaacaaccttctgactgagaagcagaagctgcgggtgaagaagatccatgagaatgagaagcgcctggaggcaggagaccaccccgtggagctgctggcccgggacttcgagaagaactataacatgtacatcttccctgtacactggcagttcggccagctggaccagcaccccattgacgggtacctctcccacaccgagctggctccactgcgtgctcccctcatccccatggagcattgcaccacccgctttttcgagacctgtgacctggacaatgacaagtacatcgccctggatgagtgggccggctgcttcggcatcaagcagaaggatatcgacaaggatcttgtgatctaaatccactccttccacagtaccggattctctctttaaccctccccttcgtgtttcccccaatgtttaaaatgtttggatggtttgttgttctgcctggagacaaggtgctaacatagatttaagtgaatacattaacggtgctaaaaataaaaattctaacccaagacatgacattcttagctgtaacttaactattaaggccttttccacacgcattaatagtcccatttttctcttgccatttgtagctttgcccattgtcttattggcacatgggtggacacggatctgctgggctctgccttaaacacacattgcagcttcaacttttctctttagtgttctgtttgaaactaatacttaccgagtcagactttgtgttcatttcatttcagggtcttggctgcctgtgggcttccccaggtggcctggaggtgggcaaagggaagtaacagacacacgatgttgtcaaggatggttttgggactagaggctcagtggtgggagagatccctgcagaacccaccaaccagaacgtggtttgcctgaggctgtaactgagagaaagattctggggctgtgttatgaaaatatagacattctcacataagcccagttcatcaccatttcctcctttacctttcagtgcagtttcttttcacattaggctgttggttcaaacttttgggagcacggactgtcagttctctgggaagtggtcagcgcatcctgcagggcttctcctcctctgtcttttggagaaccagggctcttctcaggggctctagggactgccaggctgtttcagccaggaaggccaaaatcaagagtgagatgtagaaagttgtaaaatagaaaaagtggagttggtgaatcggttgttctttcctcacatttggatgattgtcataaggtttttagcatgttcctccttttcttcaccctccccttttttcttctattaatcaagagaaacttcaaagttaatgggatggtcggatctcacaggctgagaactcgttcacctccaagcatttcatgaaaaagctgcttcttattaatcatacaaactctcaccatgatgtgaagagtttcacaaatccttcaaaataaaaagtaatgacttagaaactg

SEQ ID NO: 150 - DNA, 1363 bp, Homo sapiens
gaggaaaagctttcggactgctgaaggcccagcaggaagagaggctggatgagatcaacaagcaattcctagacgatcccaaatatagcagtgatgaggatctgccctccaaactggaaggcttcaaaggtgagggggaaactgtaggcggtggagacagggctgggggtaggagggttaggatttccacaagaacaaggcaggaacagcagagataaaaagtttacttttgtggtagcaaaaggggaacctgcctttattgccctcctgccacactgcggtccctttcccgggcctgcctctctcagcatcccctctagctccttacaccctagcggggcccctcaactccccaaccccacttcctctgcctgcccctcctcctccttccacgttgtctcctccacctagcagttggttggcaaccccttcctcactcacccagagaaatacatggagtttgaccttaatggaaatggcgatattggtgagaaacgggtgatttgcgggggcagggtggtgtgcaggcctaagaagacagaggtctctcctacatgctccattcctcatgatttgggagggggcccacctaccacagtgggaggaaggagaatggggatgcggaagtgggagaggagagagagggtctccccaccttctccccatccccatcctctgcccccagatatcatgtccctgaaacgaatgctggagaaacttggagtccccaagactcacctagagctaaagaaattaattggagaggtgtccagtggctccggggagacgttcagctaccctgactttctcaggatgatgctgggcaagagatctgccatcctaaaaatgtgagtgtcaatttccaacctcccctgtacttacctgttttctcctcccccatccctacccttgtccacaggctcaacatttctacacgttgcccatcatcccttcttccatccttagagggacccttccaaggtcccgaccccatccctatccatagtcctggtccccagaaactccaacccctgcccttcctcttcccccttccaccctcacatccccatccccttctagcctttcctagcaccctatgatttattcccttgagaggagtgttccctgatccctgtgcctcttcccatctcaaccaggatcctgatgtatgaggaaaaagcgagagaaaaggaaaagccaacaggccccccagccaagaaagctatctctgagttgccctgatttgaagggaaaagggatgatgggattgaaggggcttctaatgacccagatatggaaacagaagacaaaattgtaagccagagtcaacaaattaaataaattaccccctcctccagatcaa

SEQ ID NO: 151 - DNA, 1318 bp, Homo sapiens
ctcctctaggccgccggccgcgaagcgctgagtcacggtgaggcgactggacccacactctcttaacctgccctccctgcactcgctcccggcggctcttcgcgtcacccccgccgctaaggctccaggtgccgctaccgcagcgtgagtacctggggctcctgcaggggtccactagccctccatcctctacagctcagcatcagaacactctctttttagactccgatatggggtcctccaagaaagttactctctcagtgctcagccgggagcagtcggaaggggttggagcgagggtccggagaagcattggcagacccgagttaaaaaatctggatccgtttttactgtttgatgaatttaaaggaggtagaccaggaggatttcctgatcatccacatcgaggttttgaaacagtatcctacctcctggaagggggcagcatggcccatgaagacttctgtggacacactggtaaaatgaacccaggagatttgcagtggatgactgcgggccggggcattctgcacgctgagatgccttgctcagaggagccagcccatggcctacaactgtgggttaatttgaggagctcagagaagatggtggagcctcagtaccaggaactgaaaagtgaagaaatccctaaacccagtaaggatggtgtgacagttgctgtcatttctggagaagccctgggaataaagtccaaggtttacactcgcacaccaaccttatatttggacttcaaattggacccaggagccaaacattcccaacctatccctaaagggtggacaagcttcatttacacgatatctggagatgtgtatattgggcccgatgatgcacaacaaaaaatagaacctcatcacacagcagtgcttggagaaggtgacagtgtccaggtggagaacaaggatcccaagagaagccactttgtcttaattgctggggagccattaagagaaccagttatccaacatggtccatttgtgatgaacaccaatgaagagatttctcaagctattcttgatttcagaaacgcaaaaaatgggtttgaaagggccaaaacctggaaatcaaagattgggaactagtggaaagcggaagagcaggtcttgatgtgtcctagaattttgccatttctgagattgagccattgaaggcattccatttctaaagcttatttagccggtgcttctaaagaattccacactaacgtgataacatggtttttgtaacaataaatgtaggatatttcctggcacatgcaaataaacctaatcattgtttctttaaaaaaaaaaaaaaa

SEQ ID NO: 152 - DNA, 1161 bp, Homo sapiens
ctctgagccctgctcggtttaggcctgtctgcggaatccgcaccaaccagcaccatgcccatgatactggggtactgggacatccgcgggctggcccacgccatccgcctgctcctggaatacacagactcaagctatgaggaaaagaagtacacgatgggggacgctcctgattatgacagaagccagtggctgaatgaaaaattcaagctgggcctggactttcccaatctgccctacttgattgatggggctcacaagatcacccagagcaacgccatcttgtgctacattgcccgcaagcacaacctgtgtggggagacagaagaggagaagattcgtgtggacattttggagaaccagaccatggacaaccatatgcagctgggcatgatctgctacaatccagaatttgagaaactgaagccaaagtacttggaggaactccctgaaaagctaaagctctactcagagtttctggggaagcggccatggtttgcaggaaacaagatcacttttgtagattttctcgtctatgatgtccttgacctccaccgtatatttgagcccaagtgcttggacgccttcccaaatctgaaggacttcatctcccgctttgagggcttggagaagatctctgcctacatgaagtccagccgcttcctcccaagacctgtgttctcaaagatggctgtctggggcaacaagtagggccttgaaggccaggaggtgggagtgaggagcccatactcagcctgctgcccaggctgtgcagcgcagctggactctgcatcccagcacctgcctcctcgttcctttctcctgtttattcccatctttactcccaagacttcattgtccctcttcactccccctaaacccctgtcccatgcaggccctttgaagcctcagctacccactatccttcgtgaacatcccctcccatcattacccttccctgcactaaagccagcctgaccttccttcctgttagtggttgtgtctgctttaaagggcctgcctggcccctcgcctgtggagctcagccccgagctgtccccgtgttgcatgaaggagcagcattgactggtttacaggccctgctcctgcagcatggtccctgccttaggcctacctgatggaagtaaagcctcaaccaca

SEQ ID NO: 153 - DNA, 1100 bp, Homo sapiens
cagctgctgcccacaccgcgtcgacgccttcactgccatccccgctgtccttgccgcccccgccatgggcctagagctgtttcttgacctggtgtcccagcccagccgcgccgtctacatcttcgccaagaagaatggcatccccttagagctgcgcaccgtggatttggtcaaagggcagcacaagagcaaggagttcttgcagatcaacagcctggggaaactgccgacgctcaaggatggtgatttcatcttgaccgaaagctcggccatcctgatttacctgagctgtaagtaccagacgccggaccactggtatccatctgacctgcaggctcgtgcccgtgttcatgagtacctgggctggcatgccgactgcatccgtggcacctttggtatacccctgtgggtccaggtgttggggccactcattggggtccaggtgcccgaggagaaggtggaacgcaacaggactgccatggaccaggccctgcaatggctggaggacaagttcctgggggacaggcccttcctcgctggccagcaggtgacactggctgatctcatggccctggaggagctgatgcagccggtggctctcggctacgaactgtttgagggacggccacgactggcagcatggcgtggacgagtggaggctttcctgggtgctgagctatgccaggaggcccacagcatcatcttgagcatcctggaacaggcggccaagaaaaccctcccaacaccctcaccagaggcctatcaggctatgctgcttcgaatcgccaggatcccctgaagggtctgggatgggggccaggagattagcaacaaggattcattctgttacttacttgcccctttttatctttccctcttgccccagtcccttctctccagcttcatgtgaagctctgcacagacaagacactcagtgtccttggcagtgctgctactcctcaggtgcagcatacataaccagtaagagactaaatctgcaatatataaagagctcctacaaatcagtaacatgaagaacactcaaaaattggcaaatgtcatcagtgttttaaacagaataaagattccaaacactttga

SEQ ID NO: 154 - DNA, 945 bp, Homo sapiens
ctgggtgtacagcgtcctcgaaaccacgagcaagtgagcagatcctccgaggcaccagggactccagcccatgccatggcggattctgagcgcctctcggctcctggctgctgggccgcctgcaccaacttctcgcgcactcgaaagggaatcctcctgtttgctgagattatattatgcctggtgatcctgatctgcttcagtgcctccacaccaggctactcctccctgtcggtgattgagatgatccttgctgctattttctttgttgtctacatgtgtgacctgcacaccaagataccattcatcaactggccctggagtgatttcttccgaaccctcatagcggcaatcctctacctgatcacctccattgttgtccttgttgagagaggaaaccactccaaaatcgtcgcaggggtactgggcctaatcgctacgtgcctctttggctatgacgcctatgtcaccttccccgttcggcagccaagacatacagcagcccccactgaccccgcagatggcccggtgtaggcgaacttccctcatttctctctgcaatctgcaaataactcctccattgaaataactcctccccaccccaacaacaacattcccagcagaccaactcccaccccctctttgaggtaaaagtgcctttattgggagacttttgtcttccagcctgccaatcaaccctcctgggtgtggccaccatatgtgtgtgcctaggtcctccttctgcacgatccaataggagacaccagttctgactgaaccatgcccccacctaagtcacaaaatgagggaagtggggagttagatttcagagtccaggccctaggttgggacccactccaaataatctcctcggtgtgggtggtggttctatagagggataaatgaataataaacattgttaaaatataaaaaaaaaaaaaaaaa

SEQ ID NO: 155 - DNA, 3206 bp, Homo sapiens
ctggtgactcgcggcggcggcggcggacggcccagccggagcgcgaggggctcgggggggcgcggcggttcgggtcgcagagccagggaccccaggacccgggaggcggcgcagccggggccgccggaggagcgcgggtgacctggcggcggcgagatgccgctcgcccagctcaaggagccctggccgctcatggagctagtgccgctggacccggagaatggacagacctcaggggaagaagctggacttcagccgtccaaggatgagggcgtcctcaaggagatctccatcacgcaccacgtcaaggctggctctgagaaggctgatccatcccatttcgagctcctcaaggttctgggccagggatcctttggcaaagtcttcctggtgcggaaagtcacccggcctgacagtgggcacctgtatgctatgaaggtgctgaagaaggcaacgctgaaagtacgtgaccgcgtccggaccaagatggagagagacatcctggctgatgtaaatcacccattcgtggtgaagctgcactatgccttccagaccgagggcaagctctatctcattctggacttcctgcgtggtggggacctcttcacccggctctcaaaagaggtgatgttcacggaggaggatgtgaagttttacctggccgagctggctctgggcctggatcacctgcacagcctgggtatcatttacagagacctcaagcctgagaacatccttctggatgaggagggccacatcaaactcactgactttggcctgagcaaagaggccattgaccacgagaagaaggcctattctttctgcgggacagtggagtacatggcccctgaggtcgtcaaccgccagggccactcccatagtgcggactggtggtcctatggggtgttgatgtttgagatgctgacgggctccctgcccttccaggggaaggaccggaaggagaccatgacactgattctgaaggcgaagctaggcatgccccagtttctgagcactgaagcccagagcctcttgcgggccctgttcaagcggaatcctgccaaccggctcggctccggccctgatggggcagaggaaatcaagcggcatgtcttctactccaccattgactggaataagctataccgtcgtgagatcaagccacccttcaagccagcagtggctcagcctgatgacaccttctactttgacaccgagttcacgtcccgcacacccaaggattccccaggcatcccccccagcgctggggcccatcagctgttccggggcttcagcttcgtggccaccggcctgatggaagacgacggcaagcctcgtgccccgcaggcacccctgcactcggtggtacagcaactccatgggaagaacctggtttttagtgacggctacgtggtaaaggagacaattggtgtgggctcctactctgagtgcaagcgctgtgtccacaaggccaccaacatggagtatgctgtcaaggtcattgataagagcaagcgggatccttcagaagagattgagattcttctgcggtatggccagcaccccaacatcatcactctgaaagatgtgtatgatgatggcaaacacgtgtacctggtgacagagctgatgcggggtggggagctgctggacaagatcctgcggcagaagttcttctcagagcgggaggccagctttgtcctgcacaccattggcaaaactgtggagtatctgcactcacagggggttgtgcacagggacctgaagcccagcaacatcctgtatgtggacgagtccgggaatcccgagtgcctgcgcatctgtgactttggttttgccaaacagctgcgggctgagaatgggctcctcatgacaccttgctacacagccaactttgtggcgcctgaggtgctgaagcgccagggctacgatgaaggctgcgacatctggagcctgggcattctgctgtacaccatgctggcaggatatactccatttgccaacggtcccagtgacacaccagaggaaatcctaacccggatcggcagtgggaagtttaccctcagtgggggaaattggaacacagtttcagagacagccaaggacctggtgtccaagatgctacacgtggatccccaccagcgcctcacagctaagcaggttctgcagcatccatgggtcacccagaaagacaagcttccccaaagccagctgtcccaccaggacctacagcttgtgaagggagccatggctgccacgtactccgcactcaacagctccaagcccaccccccagctgaagcccatcgagtcatccatcctggcccagcggcgagtgaggaagttgccatccaccaccctgtgaggcaccagggcattcgggccacagggcggtgctagcttgacagagtcagcatgcttcccagagggagcaggccggaaccacagggccagagggagctggaacccgaggggccggggaagctgccagcccagaacacccctaatgagggtgtgagaagtgccttctccttccccaggatggactcttctcggctcaggctctgctggtggaaagcgattcactgtataaacttttttttatgaaaaaaatggcatcaaccaccatggatttttacaagatccatttgcctttctgggagcagaaacagccattgcggccccaggaggggaactgagtcacgctggggctctctgagactctttagagcagctttgggatcccaccctggggacccccatgattggccacctgtagccatctgcacacacctccgagacagtccagtgtcacctctctcagagcatctggctgtttagcagaactcattctatccccaatcagctccttttccgttctgttctgctgggagttctagaaccacttcctgctacaggaggggtctcatgtcctgctggcttccagcttcaggcaccagcatccaccttggctctgccagtggatcccctgcggtcaggctgggcagccccagagagaggatgtggaaagcactttttggctgacttcatctggggttggcaacaggacagagttcacaggaggccagtgggcgggccatgagggacagggtcttttttcatttcttcctcagctggttactcagggttcatctgtccatggcctttctaataaactgttgagttgaaaaaaaaaaaaaaaaaaaa

SEQ ID NO: 156 - DNA, 1182 bp, Homo sapiens
gggacaatcgtaaaaggggcgggacgcgccgcgctcgggatgtcgtgaagctgggggagctcgtcgccgccgccggcggctagcgggcgtccgcgccatggagcgctacgcggccgccttggaggaggtggcggacagtgcccggcagcaggagcgacactaccagttgctgtcggcgctacagagcctggtgaaggagttgcccagctctttccagcagcgcctgtcctacaccacgctcagcgacctggccctggcgcttctcgacggcaccgtgttcgaaatcgtgcaggggctactggagatccagcacctcaccgaaaagagcctgtacaaccagcgcctgcgcctacagaacgagcaccgagtgctcaggcaggcgctgcggcagaagcaccaggaagcccagcaggcctgccggccccacaacctgcctgtggttcaggcggctcagcagcgagaactagaggccgtggaacaccggatccgtgaggagcagcgggcgatggaccagaagatcatcctggagctggaccggaaggtggctgaccagcagagcacactggagaaggcgggggtggctggcttctacgtgaccaccaacccacaggagctgatgctgcagatgaacctgctggaactcatccgaaagctgcagcagaggggctgccgggcagggaatgcagccctgggactgggaggtccctggcagtcgcctgctgcccagtgtgaccagaaaggcagccctgtcccaccatagccacaggcagcagaagtctgggcagagttcatcttcttgacctttggccactgccttcccagctgcccgcagggggttccccctgctgaggagagaccaggtggaccctagctgcctgtcacccttcatctgggacttgctgtcaaaccctaggatagtctcataaaggggaggctgggccagcctgctgctgtctgcttcaggaccaggcagagagtgaggctgggggttctcacaccttactccaccgggcacatcccaacctgcactggggcccacccgagcgcttgttctggtctcagccgctcccttggcagctgcagcccccatgcagaagaggctcccaggcccaagctctgtgtgacccagagaaataaagatgcctcagtgtggcccaaaaaaaaaaaaaaaaaaaaaaaaaa

SEQ ID NO: 157 - DNA, 1847 bp, Homo sapiens
gaagcatacatgttttccttttgtttttgaaacttgtttgtaaacataaataaatatgcccttttattaaataaattcatggcaatgtttttttaaaagacatttcagcttctttactcagttctgcatatacagtgcatcagtctgttctctttgaccacaattggaatacatttcaagatggtaacagccccatgaagtaccgctttaattccttgctggtaatctaatagaatcagattaagaaaattaacacaattttaccatttgacatactcttcattgaatttagtttgtctaaaatagtctcacaggtaaaaaacataacaacaatgaccaccattgtctttgatacatttattttaattcttaagtggccaaataacagattaggtaaaatgagattacatgaaaaggttctaaaatgatatatttagatgcaataattaaccatatgctagaatgcccacctctaagccaattggattctttagctctctttttctttccttcatctaccttcttctcttttttgcctctgtctttaccctttagaaactggcatgtgttagggcccagatttcaccagatacacaatcctcaggctgacataaagtttacgaggactgctactataactgagagtgctgaccaagcaaagaaacatttagttgatggtgcttgatatttttggtgggtgggggaaatctttttctcaccatcaaatctttgcagtaatcctctgcaggtcttagaaacacattggctctgtcagcatttgtaattgtacatttattcatcaggtatttatagtgaatcatactgtaaaaaagaggtagcatgatatgctggaaagcatattagactaggagtcaagacctggtttctagtcttggttttgccattaatgtgctgcatgatcttgggaaaatcatttaccctaaataagggtggtggactatcttgaagaaccctttcaactctaaaaattgaccctatcaactggagagcccacaaggcatagggaatagagaaaagggaaatgttttcagttttcttttttattttggttatgcttaaatatgaatgtaattaccaaaagatttagaagtgcatgtgctttggaggatttgtattgagcttttacagtattcatttttcaactcaaggcaatggctttctacaccaactctaatccataaacgggtcttatgacatctatgaagtagtagcaagacatgcttagtgtgtatttctctctttgagacactgtaatttctaccagaaatttccagagcattatgtaggtagaaaaaaatgcaagcaagctgttaaagatcttggatcccattatatagtatgtatagctgaaatctgtaattcaatcactttttctcttttatcctctaaccaaaaaattgtttaattttgcatcccaaatgtttttaatctttgtatattttttaaaaatccttttctcctcatcattgccttttttgtggttgtaaatagacttacttgcactttgaagatgagttactccttgtcatcttacaaatatgtgatatggtaattttcataacagatgtcagttttgaaccaagaattggtgatttgtttataagaaaaaaactggcttcatttctgtgaaattgctctttgaaaatttctttttacacgtgtaagccaactgagataccgtgatggtgttgatttctttcaatgatgcttaccatctattttagccactgagccttttattatttgtctatttgtaaagtttatttgtcttaactcatttaataaatatactgtttatctgtttctgaaaaaaaaaaaaaaaaaaa

SEQ ID NO: 158 - DNA, 4221 bp, Homo sapiens
aattcggcacgagacaaaaagagaaagaaaatgccgaaaccaatcaacgtaagagtaactacaatggatgctgagctggaatttgccattcagcccaatacaactggcaaacaactttttgaccaggtggtgaaaacagttggtttgcgtgaggtctggttttttgggctgcagtatgtagacagcaaaggttattctacatggcttaaactaaataaaaaggtaacacagcaggatgttaaaaaagagaatcctttacagttcaagtttagagctaaattctttcctgaagatgtttctgaggaattaattcaagaaataacccagagactcttcttcttgcaagttaaagaagccatcttaaatgatgagatatattgcccgccagaaactgcagttcttttggcttcctatgctgtccaagccaagtatggagattacaataaagagattcataagccaggctacctggctaatgatagactcctaccccagcgtgtattggaacaacacaaactaacaaaagaacagtgggaagaaagaatacagaactggcatgaagaacatagaggaatgttaagggaggattctatgatggaatacctgaagattgcacaagatctagaaatgtatggagtcaactattttgaaataaaaaataaaaaaggaactgaattgtggctaggtgttgatgctttgggtctgaatatttatgagcatgacgacaagttaacacctaaaattggttttccctggagtgaaatcagaaatatttcatttaatgacaaaaaatttgttataaagccaatcgacaaaaaggcacctgattttgtgttttatgcacctcgtctgagaatcaataagcggattttggccttatgtatgggaaaccatgaactatacatgcgaagaaggaagcctgatactattgaagtacaacagatgaaggctcaggctagggaggagaaacatcagaagcagttggaaagggcacaattagagaatgaaaagaagaaaagagaaatagcagaaaaggaaaaggaaagaatagaacgtgaaaaggaagagctaatggaacgtctaaaacaaattgaagagcagacaattaaagctcagaaagaactagaagaacagactcgaaaagctctagaactggatcaagaacgaaaacgagcaaaagaagaagcagaacgacttgaaaaggagcgtcgagctgctgaagaggcaaagtctgccatagcaaaacaagctgccgaccagatgaagaatcaggagcagctagcagcagaacttgctgaattcactgccaagattgcacttctagaggaagccaagaagaaaaaggaagaggaagcaactgagtggcaacacaaagcttttgcagcccaggaagacttggaaaagaccaaagaagagttaaaaactgtgatgtctgccccccctccacctccaccaccaccagtcattcctccaacagaaaacgaacatgatgaacacgatgagaataatgctgaagctagtgctgaattatcaaatgaaggggtaatgaaccatagaagcgaggaagaacgtgtaaccgaaacacagaaaaatgagcgtgttaagaagcaacttcaggcattaagttcagaattagcccaagccagagatgaaaccaagaaaacacaaaatgatgttcttcatgctgagaatgttaaagcaggccgtgataagtacaagactctgcgacagattcgacaaggcaatacaaagcagcgtatcgatgagtttgaagcaatgtgagagctgttattttgcatatatgttcttcataagctgaaccaccaacagagaaaagcaggcctttgcagatatgatggaatgcatcccaccttgccaaagcacttacaccagtttgactgtgctagctaaaagacaaatttaaggggagctcttcaacattaaggcagtatgatatcatgcttggttttcttttttcttttggtccagggaatggagaatggtgttccattgcctcttttcacattttttttctttttcttttttttttctgttgaagattaacactaattatcacgtctgacaaatgtgtatgtgtggtttcagttctgtgtacattttaaaggataatggtgaacattttaatgggtttcccttgccctttccatatttaacctatttccacattctctctcactcacattttctcagtgtgcccttctcttatctgccatgtccatagccataattccaccatcatacagatcaggcagtgtttaaaatgatggtaggtagcacagtggacagtctttgatcatcatgtagaatatggctatgaatcaggaaagagattagaacatttaataatgtatgtacagctggtgcttagtttttttttaatctaaatttaattaccttattggatatttgatatttggttatttaatcacagtcatctttaacagcttacactgattggtgttttatctcctgtgatcctttgatggctttttttgcctaccatttcacagaggtttagacagcagtagtagctccctaggagagtttactgatgaaacagcctctgcaagattttaaaagttttgttcttttatagactgatttagaaaaacaaatgattagttaaaaaaagaaaatatacatttgttggtaactaatgttattttttaaaacctggacctttctggaagggcagcatataaaaacatcagtcccgaggaggggacaacaatactacctcactactacatctgtgatgactggttgttcaaacacaatggagtgtgtaaggtatatgttttataattcataaccatagcctcgatcatcaagaaatactttcgaaatttcattttccttcagaatatcttaagagtgctaaatttttaactgcctttttgtcgagtcaaactgtgggattctgatttgtattaaaattgtaagctcctcactggtatactatcatcctggaggggtgttgtatggctgagcaagagagagagagaatgagagagagactgtgtgtgtgtgtgtgtgtgtgtgtactctgtgtgtgtatgagagagagagagaaatgctaaccttgtagcatgtgaagaatgtctgtaccttgatacgatagttacataatcagtatatttggtttctagatcactgtgcttattttgtttcaatctctgactaaaaatacttaaatttggtttgttaattcttattttagaaattataattttagtttatattaatttcggttatagcttactgaagaaatctttccagttagaaggaggttctaatattcacatgttctaatactttgtttattgtaaaacagctaaatttggagatacgtaaagccttgttttctctgtgtggttcagctactttccatttggtattacacagtcaaatttacatttatctattaaaattgccattttattaaacattttcatgcacagtagattcaagttgtgtctgaaaatatctcttgtgcttttttgattttgctgactttaaaaggattaatctgggcagacattatgtaaaagaaaggttgcgtttaatatattttttgaactttgtaggacaaaacatagctggttaaccttgaagtgactgttgtaccatggttgtgcacatgcttcagaatcctatggaagagaatattcctacttgcagtacatcaaaggaatggatggtggaccctactattcatgttttgagacataaatgttcactttaaagcaattgcataatagataaaaacctgaactttcattggatttttgttaattttcctcattttgaattatgtgcactaccatagctacatcagtttgatacagtattgaaaaattatcagttatattttgctgtttatgatctatttgtagattaggattaaaatggatttaatccatttttaaggctgtgtgaatttttctaaacaagaaccatttgcaatatggatttcttagagattaaaccaattataacttattagcagtcgcgagcacatgttcatatagtcaatgtaaaaatacactaatgagtatttggtaaatcccagtaggcttttaccattagcataattttgtgttgtacaattaagttacaattacatctctaattttggataatattcattggttaacaataaagtgacaaaagctcatgcaaaaaaaaaaaaaaaaaaaa

SEQ ID NO: 159 - DNA, 1524 bp, Homo sapiens
gccgtcttcccctcctcccgtcctccctcgccccgcatgtactccccgtactgcctcacccaggatgagttccacccgttcatcgaggcactgctgcctcacgtccgcgctttctcctacacctggttcaacctgcaggcgcggaagcgcaagtacttcaagaagcatgaaaagcggatgtcgaaggacgaggagcgggcggtgaaggacgagctgctgggcgagaagcccgagatcaagcagaagtgggcatcccggctgctggccaagctgcgcaaggacatccggcccgagttccgcgaggactacgtgctgaccatcacgggcaagaagcccccctgctgcgtgctctccaaccccgaccagaagggcaagatccggcggattgactgcctgcgccaggctgacaaggtgtggcggctggacctggtcatggtgattttgtttaaggggatccccctggaaagtactgatggggagcggctctacaagtcgcctcagtgctcgaaccccggcctgtgcgtccagccacatcacattggagtcacaatcaaagaactggatctttatctggcttactttgtccacactccggaatccggacaatcagatagttcaaaccagcaaggagatgcggacatcaaaccactgcccaacggacacttaagtttccaggactgttttgtgacttccggggtctggaatgtgacggagctggtgagagtatcacagactcctgttgcaacagcatcagggcccaacttctccctggcggacctggagagtcccagctactacaacatcaaccaggtgaccctggggcggcggtccatcacctcccctccttccaccagcaccaccaagcgccccaagtccatcgatgacagtgagatggagagccctgttgatgacgtgttctatcccgggacaggccgttccccagcagctggcagcagccagtccagcgggtggcccaacgatgtggatgcaggcccggcttctctaaagaagtcaggaaagctggacttctgcagtgccctctcctctcagggcagctccccgcgcatggctttcacccaccacccgctgcctgtgcttgctggagtcagaccagggagcccccgggccacagcatcagccctgcacttcccctccacgtccatcatccagcagtcgagcccgtatttcacgcacccgaccatccgctaccaccaccaccacgggcaggactcactgaaggagtttgtgcagtttgtgtgctcggatggctcgggccaggccaccggacagcattcgcaacgacaggcgcctcctctgccaaccggtttgtcagcatcggaccccgggacggcaactttctgaacatcccacagcagtctcagtcctggttcctctgataaagatcgacaaaagaaacaacaaaatgagaagaagaggttcctcgaaaggggggagaagaaattttgagaacggaaaaatcccccagcccagcccagcccagccccaccggaaagcaaaaatttc

SEQ ID NO: 160 - DNA, 1143 bp, Homo sapiens
ggagctctggaggcggggcttcgagcgtggctcgtgggttttccgtgaagtcgcggtgcagcggtgggcggcatgtctgtggccggtggggagattcgtggggacacggggggagaggacactgctgctcccggccggttcagcttcagcccggagcccacgctcgaggacatccgccgcctccatgctgagtttgctgcggaacgagactgggaacagttccatcagcctcggaatctcctcctggccttggttggggaagtgggggagctggcagaactctttcagtggaaaaccgatggggaacctggcccccaaggctggtcccccagggaacgggcagcccttcaagaggagcttagtgacgtcctcatctacctggtggcattagcagcccgctgccgtgtggatctgccgctagcagtgctctccaaaatggacatcaaccggcgacgctacccagcccatctggcccgcagctcttcccgcaagtatacagaattgccccatggggccatctctgaagaccaggctgtggggcctgcggacattccctgtgactccacaggccagacctcaacctagaaagatggccacaggacttgcaactcagggtggtgtctgaagagcagagagtggcctggccctggagcctttttctagtcttttcagaatagatcatgggcctgaggcctccacttcttgaggtctgaggcccagcagcctctagaaggtagcctcctggtgtttgttctcccagtaaaatggttttgggcgataacttctagattattcctggatggccagggaggctctctgtctcagcaggtgatgacgggggtaccaggggtgcctctgagacccattctcgtgtttccctgttgtaccttttgcctgcagggcagagagatctggtttctagcaaattcccagtaggatgtcatgtaagttccttccccctcttagagattgaaggctgtaagagtccagatggtggagccaggctgtctgggttcaaatgccatctttgacacttgcaagctaaatgacattactcaaattaatcgttctgcacttcagcttccttgtctatcaaataaaaagaatagtacctgcccaaaaaaaaaaaaaaaaaaaaaaaaa

SEQ ID NO: 161 - DNA, 3185 bp, Homo sapiens
gggcgccccgccggtcacttccgcgcggacaccagccttgcagagcccagggagatggaagacttcgcccgaggggcggcctccccaggcccctcccggcctggcctggttcccgtcagcatcatcggggctgaggatgaggattttgagaacgagctggagacaaactcagaagagcaaaacagccagttccagagcctggagcaggtgaagcggcgcccagcccacctcatggccctcctgcagcacgtggccctgcagtttgagccaggacccctgctttgctgtctgcatgccgacatgctgggctcactgggccccaaggaggccaagaaggccttcctggacttctaccacagcttcctggagaagacagcggttctccgggtgccggtccctcccaacgtcgcctttgaacttgaccgcactagggctgacctcatctccgaggatgtccagcggcggttcgtgcaggaggtggtgcaaagccagcaggtagccgtgggccggcagctggaggacttccgttccaagcggctcatgggcatgacgccctgggagcaggagctggcccagctggaggcttgggttgggcgggaccgagccagctacgaggcccgggagcggcacgtggcggagcggctgctcatgcacctggaggagatgcaacataccatctctaccgacgaagaaaagagtgctgccgtggtcaacgccattggcctgtacatgcgccaccttggggtgcggaccaagagtggagacaagaagtcggggaggaacttcttccggaaaaaggtgatggggaaccggcggtcggacgagcctgccaagaccaagaaggggctgagcagcatcctggatgccgcccgctggaaccggggagagccccaggttccagattttcgacacctcaaagcagaggttgatgccgagaagccaggtgctacagaccggaagggaggcgtggggatgccctctcgggaccggaatatcggggctcctgggcaggacacccctggagtctctctgcaccctctgtccctggacagcccagaccgggaaccaggtgctgacgcccccctggagctgggggactcatccccgcagggcccaatgagcctggagtccttggcgcccccagagagtaccgacgagggggccgaaaccgagagccccgagcctggagatgagggggagccggggcggtcgggactggagcttgaaccagaagagcctcccggctggcgggaactcgtccccccagacaccctgcacagcctgcccaagagccaggtgaagcggcaggaggtcatcagcgagctgctggtgacagaggcggcccacgtgcgcatgctgcgggtgctgcacgacctcttcttccagcccatggcagaatgcctgttcttccccttggaggagctgcagaacatcttccccagcctggacgagctcatcgaggtgcattccctgttcctcgatcgcctgatgaagcggaggcaggagagtggctacctcatcgaggagatcggagacgtgctgctggcccggtttgatggtgctgagggctcctggttccagaaaatctcctcccgcttctgcagccgccagtcatttgccttagagcagctcaaagccaagcaacgcaaggaccctcggttctgtgccttcgtgcaggaagctgagagccgcccgcggtgccgccgcctgcagctgaaggacatgatccccacggagatgcagcggctgaccaagtaccccctgctcctgcagagcatcgggcagaacacagaagagcccacagaacgggagaaagtggagctggcagccgagtgctgccgggaaattctacaccacgtcaaccaagccgtgcgtgacatggaggacctgctgaggctcaaggactatcagcggcgcctggacttgtcccaccttcggcagagcagcgaccctatgctgagcgagttcaagaacctggacatcaccaagaagaaattggtccacgagggcccactgacgtggcgggtgactaaggacaaggcagtggaggtgcatgtgctgctgctggacgacctgctgctgctgctccagcgccaggacgagcggctgctgctcaagtcccatagccggacactgacgcccacgcccgatggcaagaccatgctgcggcccgtgctgcggctcacctccgccatgacccgcgaggtggccaccgatcacaaagccttctacgtcctttttacctgggaccaggaggcccagatatacgagctggtggcacagactgtgtcggagcggaaaaactggtgtgctctcatcactgagactgccggatccctgaaagtccctgcccctgcctctcgccctaagccccggcccagcccgagcagcacccgagaacccctcctcagcagctctgagaacggcaatggtggccgagagacgtctccagctgatgcccggaccgagagaatcctcagtgacctcctgcccttctgcagaccaggccccgagggccagctcgctgccacggcccttcggaaagtgctgtccctgaagcagcttctgtttccggcggaggaagacaatggggcggggcctcctcgagatggggatggggtcccagggggcggccccctgagcccagcacggacccaggaaatccaggagaacctgctcagcttggaggagaccatgaagcagctggaggagttggaggaggaattttgccgcctgagacccctcctgtctcagcttggggggaactctgtcccccagcctggctgcacttgaggttcccgcccaggaaggccttttgcaagaaggagaggaatgggggagaggacgtgagggaccacccccacccacacagctgccgcagcatctcacaccccgagggcctgaggagagggagctgtgggccacgcctgggaggggcccagctggggttactggccccgcatgagcctcggccatctctccctcctgccctctgcttgggggactcagggctccattctggagggcaccacggtgacccgggccatctcagtattgcctgtgggggccacccctccacccccacccccaagtgccttcgctctgtttttataccctgaattggagggtttattttttaatatatattatctaagaagaaaaaaaaaaaaaaaaaaaaaaaaaaa

SEQ ID NO: 162 - DNA, 1320 bp, Homo sapiens
ggagcaacgctaggaagggcgggcagaaagggcacgctcttgtgggtgactacaggttaggagaccgttgaacctggaggggccctaggatggaccccgtggaaagattcagagactgcgccctctccctggcgccgccttcccctacacgcggcgggtatattctgttgcagttggcccaggacctgtttccaagactctgccccctcgcacttccgtccctcctggttttgtaaagtgatgctcataggaacccccaccccgcgtgacactactcccagctcctggctgacttctagtcttctggttgaagctgcgcctttagatgacacgaccctacccacccctgtttccagcggatgcccgggcctggagcccacagaattcttccagtccctgggtggggacggagaaaggaacgttcagattgagatggcccatggcaccaccacgctcgccttcaagttccagcatggagtgattgcagcagtggattctcgggcctcagctgggtcctacattagtgccttacgggtgaacaaggtgattgagattaacccttacctgcttggcaccatgtctggctgtgcagcagactgtcagtactgggagcgcctgctggccaaggaatgcaggctgtactatctgcgaaatggagaacgtatttcagtgtcggcagcctccaagctgctgtccaacatgatgtgccagtaccggggcatgggcctctctatgggcagtatgatctgtggctgggataagaagggtcctggactctactacgtggatgaacatgggactcggctctcaggaaatatgttctccacgggtagtgggaacacttatgcctacggggtcatggacagtggctatcggcctaatcttagccctgaagaggcctatgaccttggccgcagggctattgcttatgccactcacagagacagctattctggaggcgttgtcaatatgtaccacatgaaggaagatggttgggtgaaagtagaaagtacagatgtcagtgacctgctgcaccagtaccgggaagccaatcaataatggtggtggtggcagctgggcaggtctcctctgggaggtcttggccgactcagggacctaagccacgttaagtccaaggagaagaagaggcctagcctgagccaaagagagagtacgggctcagcagccagaggaggccggtgaagtgcatcttctgcgtgttctctatttgaacaagcatttcccccagggaagtttctgggtgccccactaagtagaataaagaaaaacggttataaataaaaaaaaaaaaaaaaaaaa

SEQ ID NO: 163 - DNA, 2717 bp, Homo sapiens
cagggtaacgctgtcttgtggacccgcacttcccacccgagacctctcactgagcccgagccgcgcgcgacatgagccacgggaagggaaccgacatgctcccggagatcgccgccgccgtgggcttcctctccagcctcctgaggacccggggctgcgtgagcgagcagaggcttaaggtcttcagcggggcgctccaggaggcactcacagagcactacaaacaccactggtttcccgaaaagccgtccaagggctccggctaccgctgcattcgcatcaaccacaagatggaccccatcatcagcagggtggccagccagatcggactcagccagccccagctgcaccagctgctgcccagcgagctgaccctgtgggtggacccctatgaggtgtcctaccgcattggggaggacggctccatctgcgtcttgtacgaggaggccccactggccgcctcctgtgggctcctcacctgcaagaaccaagtgctgctgggccggagcagcccctccaagaactacgtgatggcagtctccagctaggcccttccgcccccgccctgggcgccgccgtgctcatgctgccgtgacaacaggccaccacatacctcaacctggggaactgtatttttaaatgaagagctatttatatatattatttttttttaagaaaggaggaaaagaaaccaaaagttttttttaagaaaaaaaatccttcaagggagctgcttggaagtggcctccccaggtgcctttggagagaactgttgcgtgcttgagtctgtgagccagtgtctgcctataggagggggagctgttagggggtagacctagccaaggagaagtgggagacgtttggctagcaccccaggaagatgtgagagggagcaagcaaggttagcaactgtgaacagagaggtcgggatttgccctgggggaggaagagaggccaagttcagagctctctgtctcccccagccagacacctgcatccctggctcctctattactcaggggcattcatgcctggacttaaacaatactatgttatcttttcttttatttttctaatgaggtcctgggcagagagtgaaaaggcctctcctgattcctactgtcctaagctgcttttcttgaaatcatgacttgtttctaattctaccctcaggggcctgtagatgttgctttccagccaggaatctaaagctttgggttttctgagggggggaggagggaactggaggttattggggttaggatggaagggaactctgcacaaaacctttgctttgctagtgctgctttgtgtgtatgtgtggcaaataatttgggggtgatttgcaatgaaattttgggacccaaagagtatccactggggatgttttttggccaaaactcttccttttggaaccacatgaaagtcttgatgctgctgccatgatccctttgagaggtggctcaaaagctacagggaactccaggtcctttattactgccttcttttcaaaagcacaactctcctctaaccctcccctcccccttcccttctggtcgggtcatagagctaccgtattttctaggacaagagttctcagtcactgtgcaatatgccccctgggtcccaggagggtctggaggaaaactggctatcagaacctcctgatgccctggtgggcttagggaaccatctctcctgctctccttgggatgatggctggctagtcagccttgcatgtattccttggctgaatgggagagtgccccatgttctgcaagactacttggtattcttgtagggccgacactaaataaaagccaaaccttgggcactgttttttctccctggtgctcagagcacctgtgggaaaggttgctgtctgtctcagtacaatccaaatttgtcgtagacttgtgcaatatatactgttgtgggttggagaaaagtggaaagctacactgggaagaaactcccttccttcaatttctcagtgacattgatgaggggtcctcaaaagacctcgagtttcccaaaccgaatcaccttaagaaggacagggctagggcatttggccaggatggccaccctcctgctgttgccccttagtgaggaatcttcaccccacttcctctacccccaggttctcctccccacagccagtcccctttcctggatttctaaactgctcaattttgactcaaaggtgctatttaccaaacactctccctacccattcctgccagctctgcctccttttcaactctccacattttgtattgccttcccagacctgcttccagtctttattgctttaaagttcactttgggcccacagacccaagagctaattttctggtttgtgggttgaaacaaagctgtgaatcactgcaggctgtgttcttgcatcttgtctgcaaacaggtccctgcctttttagaagcagcctcatggtctcatgcttaatcttgtctctcttctcttctttatgatgttcactttaaaaacaacaaaacccctgagctggactgttgagcaggcctgtctctcctattaagtaaaaataaatagtagtagtatgtttgtaagctattctgacagaaaagacaaaggttactaattgtatgatagtgtttttatatggaagaatgtacagcttatggacaaatgtacacctttttgttactttaataaaaatgtagtaggataaaaaaaaa

SEQ ID NO: 164 - DNA, 1806 bp, Homo sapiens
agcctcgccagagaagacaagggcagaaagcaccatgagtgggggcccaatgggaggaaggcccgggggccgaggagcaccagcggttcagcagaacataccctccaccctcctccaggaccacgagaaccagcgactctttgagatgcttggacgaaaatgcttgacgctggccactgcagttgttcagctgtacctggcgctgccccctggagctgagcactggaccaaggagcattgtggggctgtgtgcttcgtgaaggataacccccagaagtcctacttcatccgcctttacggccttcaggctggtcggctgctctgggaacaggagctgtactcacagcttgtctactccacccccacccccttcttccacaccttcgctggagatgactgccaagcggggctgaactttgcagacgaggacgaggcccaggccttccgggccctcgtgcaggagaagatacaaaaaaggaatcagaggcaaagtggagacagacgccagctacccccaccaccaacaccagccaatgaagagagaagaggagggctcccacccctgcccctgcatccaggtggagaccaaggaggccctccagtgggtccgctctccctggggctggcgacagtggacatccagaaccctgacatcacgagttcacgataccgtgggctcccagcacctggacctagcccagctgataagaaacgctcagggaagaagaagatcagcaaagctgatattggtgcacccagtggattcaagcatgtcagccacgtggggtgggacccccagaatggatttgacgtgaacaacctcgacccagatctgcggagtctgttctccagggcaggaatcagcgaggcccagctcaccgacgccgagacctctaaacttatctacgacttcattgaggaccagggtgggctggaggctgtgcggcaggagatgaggcgccaggagccacttccgccgcccccaccgccatctcgaggagggaaccagctcccccggccccctattgtggggggtaacaagggtcgttctggtccactgccccctgtacctttggggattgccccacccccaccaacaccccggggacccccacccccaggccgagggggccctccaccaccaccccctccagctactggacgttctggaccactgccccctccaccccctggagctggtgggccacccatgccaccaccaccgccaccaccgccaccgccgcccagctccgggaatggaccagcccctcccccactccctcctgctctggtgcctgccgggggcctggcccctggtgggggtcggggagcgcttttggatcaaatccggcagggaattcagctgaacaagacccctggggccccagagagctcagcgctgcagccaccacctcagagctcagagggactggtgggggccctgatgcacgtgatgcagaagagaagcagagccatccactcctccgacgaaggggaggaccaggctggcgatgaagatgaagatgatgaatgggatgactgagtggctgagttacttgctgccctgtgctcctccccgcaggacatggctccccctccacctgctctgtgcccaccctccactctcctcttccagggcccccaaccccccatttcttccccaccaacccctccaatgctgttatccctgcctggtcctcacactcacccaacaatcccaaggccctttttatacaaaaattctcagttctcttcactcaaggatttttaaagaaaaataaaagaattgtctttctgtctctctat

SEQ ID NO: 165 - DNA, 3187 bp, Homo sapiens
cgcccggagtcggagccgggagcgctagcggcagccggatcgcagcctgcggggcccgccgcagccatgggcaaccgcggcatggaagatctcatcccgctggtcaaccggctgcaagacgccttctctgccatcggccagaacgcggacctcgacctgccgcagatcgctgtggtgggcggccagagcgccggcaagagctcggtgctcgagaatttcgtaggcagggacttcttgcctcgaggatctggcattgtcacccgacgtcccctggtcttgcagctggtcaatgcaaccacagaatatgccgagttcctgcactgcaagggaaagaaattcaccgacttcgaggaggtgcgccttgagatcgaggccgagaccgacagggtcaccggcaccaacaagggcatctcgccggtgcctatcaacctccgcgtctactcgccgcacgtgctgaacctgaccctggtggacctgcccggaatgaccaaggtcccggtgggggaccaacctcccgacatcgagttccagatccgagacatgcttatgcagtttgtcaccaaggagaactgcctcatcctggccgtgtcccccgccaactctgacctggccaattctgacgccctcaaggtcgccaaggaggtggacccccagggccagcgcaccatcggggtcatcaccaagctggacctgatggacgagggcacagatgcccgtgatgtgctggagaacaagctgctccccctgcgcagaggctacattggagtggtgaaccggagccagaaggacattgatggcaagaaggacattaccgccgccttggctgctgaacgaaagttcttcctctcccatccatcttatcgccacttggctgaccgtatgggcacgccctacctgcagaaggtcctcaatcagcaactgacgaaccacatccgggacacactgccggggctgcggaacaagctgcagagccagctactgtccattgagaaggaggtggaggaatacaagaacttccgccctgatgacccagctcgcaagaccaaggccctgctgcagatggtccagcagtttgccgtagactttgagaagcgcattgagggctcaggagatcagatcgacacctacgaactgtcagggggagcccgcattaaccgaatcttccacgagcgcttccctttcgagctggtcaagatggagtttgatgagaaggaactccgaagggagatcagctatgctatcaagaatatccatggcattagaacggggctgtttaccccagacatggcctttgagaccattgtgaaaaagcaggtgaagaagatccgagaaccgtgtctcaagtgtgtggacatggttatctcggagctaatcagcaccgttagacagtgcaccaagaagctccagcagtacccgcggctacgggaggagatggagcgcatcgtgaccacccacatccgggagcgcgagggccgcactaaggagcaggtcatgcttctcatcgatatcgagctggcttacatgaacaccaaccatgaggacttcataggctttgccaatgctcagcagaggagcaaccagatgaacaagaagaagacttcagggaaccaggatgagattctggtcatccgcaagggctggctgactatcaataatattggcatcatgaaagggggctccaaggagtactggtttgtgctgactgctgagaatctgtcctggtacaaggatgatgaggagaaagagaagaaatacatgctgtctgtggacaacctcaagctgcgggacgtggagaagggctttatgtcgagcaagcatatctttgccctctttaacacggagcagaggaatgtctacaaggattatcggcagctggagctagcctgtgagacacaggaggaggtggacagctggaaggcctccttcctgagggctggcgtgtaccctgagcgtgttggggacaaagagaaagccagcgagaccgaggagaatggctccgacagcttcatgcattccatggacccacagctggaacggcaagtggagaccatccggaatcttgtggactcatacatggccattgtcaacaagaccgtgagggacctcatgcccaagaccatcatgcacctcatgattaacaataccaaggagttcatcttctcggagctgctggccaacctgtactcgtgtggggaccagaacacgctgatggaggagtcggcggagcaggcacagcggcgcgacgagatgctgcgcatgtaccacgcactgaaggaggcgctcagcatcatcggcaacatcaacacgaccaccgtcagcacgcccatgcccccgcccgtggacgactcctggctgcaggtgcagagcgtaccggccggacgcaggtcgcccacgtccagccccacgccgcagcgccgagcccccgccgtgcccccagcccggcccgggtcgcggggccctgctcctgggcctccgcctgctgggtccgccctggggggggcgccccccgtgccctccaggccgggggcttcccctgaccctttcggccctccccctcaggtgccctcgcgccccaaccgcgccccgcccggggtccccagccgatcgggtcaggcaagtccatcccgtcctgagagccccaggccccccttcgacctctaaacagatccctcctcttctcggagacctccctttccaagcctgcctggacggctgttctgtgacttgacagtggctcccccagccccaaagccagcccccttcatctgtgacttaatctgttgtagtggtgagctgatacattcaggtgtgaccgttggtgaaaacttgtgccccttctgtggtatgcccttgccctgttctataaatatctataaatactcatatatatacacacctacacatggccaaccgcctcgcctctagcgctgggaatcagtcactgtgctatccttgtggagtcttgtggcccaactaccagagaacgctgtcccccgacatcccactccaaagtgtgccacctccagtgagcctccttgtcatgcccggcctgtggacagccagcccccgccatccctcccaccccctaccaagcatgggggtgctgtgcaggcagccgtgtggcctgacagtttctaccagtcctgctgtccctcggctgagaataaaacccatttctggatgatgg

SEQ ID NO: 166 - DNA, 1038 bp, Homo sapiens
atgcaacgcctggtggcctgggacccagcatgtctccccctgccgccgccgccgcctgcctttaaatccatggaagtggccaacttctactacgaggcggactgcttggctgctgcgtacggcggcaaggcggcccccgcggcgccccccgcggccagacccgggccgcgcccccccgccggcgagctgggcagcatcggcgaccacgagcgcgccatcgacttcagcccgtacctggagccgctgggcgcgccgcaggccccggcgcccgccacggccacggacaccttcgaggcggctccgcccgcgcccgcccccgcgcccgcctcctccgggcagcaccacgacttcctctccgacctcttctccgacgactacgggggcaagaactgcaagaagccggccgagtacggctacgtgagcctggggcgcctgggggctgccaagggcgcgctgcaccccggctgcttcgcgcccctgcacccaccgcccccgccgccgccgccgcccgccgagctcaaggcggagccgggcttcgagcccgcggactgcaagcggaaggaggaggccggggcgccgggcggcggcgcaggcatggcggcgggcttcccgtacgcgctgcgcgcttacctcggctaccaggcggtgccgagcggcagcagcgggagcctctccacgtcctcctcgtccagcccgcccggcacgccgagccccgctgacgccaaggcccccccgaccgcctgctacgcgggggccgggccggcgccctcgcaggtcaagagcaaggccaagaagaccgtggacaagcacagcgacgagtacaagatccggcgcgagcgcaacaacatcgccgtgcgcaagagccgcgacaaggccaagatgcgcaacctggagacgcagcacaaggtcctggagctcacggccgagaacgagcggctgcagaagaaggtggagcagctgtcgcgcgagctcagcaccctgcggaacttgttcaagcagctgcccgagcccctgctcgcctcctccggccactgctag

SEQ ID NO: 167 - DNA, 1742 bp, Homo sapiens
ctccgatctagaggcagattcctgactaatcccagagggctggcccagcctgtgctccccgggctgctaggaagcgatgaccactcttgttagcccaagttgaagaaagccgggctgtgcctgggagccgagagaggcggtaatatttagaagctgcacaggagaggaacatgaactgacgagtaaacatgtatggaaattattctcacttcatgaagtttcccgcaggctatggaggctcccctggccacactggctctacatccatgagcccatcagcagccttgtccacagggaagccaatggacagccaccccagctacacagataccccagtgagtgccccacggactctgagtgcagtggggacccccctcaatgccctgggctctccatatcgagtcatcacctctgccatgggcccaccctcaggagcacttgcagcgcctccaggaatcaacttggttgccccacccagctctcagctaaatgtggtcaacagtgtcagcagttcagaggacatcaagcccttaccagggcttcccgggattggaaacatgaactacccatccaccagccccggatctctggttaaacacatctgtgccatctgtggagacagatcctcaggaaagcactacggggtatacagttgtgaaggctgcaaagggttcttcaagaggacgataaggaaggacctcatctacacgtgtcgggataataaagactgcctcattgacaagcgtcagcgcaaccgctgccagtactgtcgctatcagaagtgccttgtcatgggcatgaagagggaagctgtgcaagaagaaagacagaggagccgagagcgagctgagagtgaggcagaatgtgctaccagtggtcatgaagacatgcctgtggagaggattctagaagctgaacttgctgttgaaccaaagacagaatcctatggtgacatgaatatggagaactcgacaaatgaccctgttaccaacatatgtcatgctgctgacaagcagcttttcaccctcgttgaatgggccaagcgtattccccacttctctgacctcaccttggaggaccaggtcattttgcttcgggcagggtggaatgaattgctgattgcctctttctcccaccgctcagtttccgtgcaggatggcatccttctggccacgggtttacatgtccaccggagcagtgcccacagtgctggggtcggctccatctttgacagagtcctaactgagctggtttccaaaatgaaagacatgcagatggacaagtcggaactgggatgcctgcgagccattgtactctttaacccagatgccaagggcctgtccaacccctctgaggtggagactctgcgagagaaggtttatgccacccttgaggcctacaccaagcagaagtatccggaacagccaggcaggtttgccaagctgctgctgcgcctcccagctctgcgttccattggcttgaaatgcctggagcacctcttcttcttcaagctcatcggggacacccccattgacaccttcctcatggagatgttggagaccccgctgcagatcacctgagccccaccagccacagcctccccacccaggatgacccctgggcaggtgtgtgtggacccccaccctgcactttcctccacctcccaccctgacccccttcctgtccccaaaatgtgatgcttataataaagaaaacctttctacaaaaaaaaaaaaaaaaaa

SEQ ID NO: 168 - DNA, 1521 bp, Homo sapiens
  misc_feature (798)..(798): N may be C, G, T or A
cggccgcggcccgggtccctcgcaaagccgctgccatcccggagggcccagccagcgggctcccggaggctggccgggcaggcgtggtgcgcggtaggagctgggcgcgcacggctaccgcgcgtggaggagacactgccctgccgcgatgggggcccggggcgctccttcacgccgtaggcaagcggggcggcggctgcggtacctgcccaccgggagctttcccttccttctcctgctgctgctgctctgcatccagctcgggggaggacagaagaaaaaggagaatcttttagctgaaaaagtagagcagctgatggaatggagttccagacgctcaatcttccgaatgaatggtgataaattccgaaaatttataaaggcaccacctcgaaactattccatgattgttatgttcactgctcttcagcctcagcggcagtgttctgtgtgcaggcaagctaatgaagaatatcaaatactggcgaactcctggcgctattcatctgctttttgtaacaagctcttcttcagtatggtggactatgatgaggggacagacgtttttcagcagctcaacatgaactctgctcctacattcaygcatttwcctccaaaaggcagacctaagagagctgatacttttgacctccaaagaattggatttgcagctgagcaactagcaaagtggattgctgacagaacggatgttcatattcgggttttcagaccacccaactactctggtaccattgctttggccctgttagtgtcgcttgttggaggtttgctttattngagaaggaacaacttggagttcatctataacaagactggttgggccatggtgtctctgtgtatagtctttgctatgacttctggccagatgtggaaccatatccgtggacctccatatgctcataagaacccacacaatggacaagtgagctacattcatgggagcagccaggctcagtttgtggcagaatcacacattattctggtactgaatgccgctatcaccatggggatggttcttctaaatgaagcagcaacttcgaaaggcgatgttggaaaaagacggataatttgcctagtgggattgggcctggtggtcttcttcttcagttttctactttcaatatttcgttccaagtaccacggctatccttatagtgatctggactttgagtgagaagatgtgatttggaccatggcacttaaaaactctataacctcagctttttaattaaatgaagccaagtgggatttgcataaagtgaatgtttaccatgaagataaactgttcctgactttatactattttgaattcattcatttcattgtgatcagctagcttattcttgtgtactttttttaaactgtgggttttcctagtaaatttaatttacagaaatcaatggtagcatttagtaatctacaaaggaaatatcaaagtgtttttcaagcctgttatatycagtgtgtkccacaggattgcaataaatgacaatgtaatta

SEQ ID NO: 169 - DNA, 2678 bp, Homo sapiens
atgcgacccgaccgcgctgaggctccaggaccgcccgccatggctgcaggaggtcccggcgcggggtctgcggccccggtctcctccacatcctcccttcccctggctgctctcaacatgcgagtgcggcgccgcctgtctctgttcttgaacgtgcggacacaggtggcggccgactggaccgcgctggcggaggagatggactttgagtacttggagatccggcaactggagacacaagcggaccccactggcaggctgctggacgcctggcagggacgccctggcgcctctgtaggccgactgctcgagctgcttaccaagctgggccgcgacgacgtgctgctggagctgggacccagcattgaggaggattgccaaaagtatatcttgaagcagcagcaggaggaggctgagaagcctttacaggtggccgctgtagacagcagtgtcccacggacagcagagctggcgggcatcaccacacttgatgaccccctggggcatatgcctgagcgtttcgatgccttcatctgctattgccccagcgacatccagtttgtgcaggagatgatccggcaactggaacagacaaactatcgactgaagttgtgtgtgtctgaccgcgatgtcctgcctggcacctgtgtctggtctattgctagtgagctcatcgaaaagaggtgccgccggatggtggtggttgtctctgatgattacctgcagagcaaggaatgtgacttccagaccaaatttgcactcagcctctctccaggtgcccatcagaagcgactgatccccatcaagtacaaggcaatgaagaaagagttccccagcatcctgaggttcatcactgtctgcgactacaccaacccctgcaccaaatcttggttctggactcgccttgccaaggccttgtccctgccctgaagactgttctgaggccctgggtgtgtgtgtatctgtctgcctgtccatgtacttctgccctgcctcctcctttcgttgtaggaggaatctgtgctctacttacctctcaattcctggagatgccaacttcacagacacgtctgcagcagctggacatcacatttcatgtcctgcatggaaccagtggctgtgagtggcatgtccacttgctggattatcagccaggacactatagaacaggaccagctgagactaagaaggaccagcagagccagctcagctctgagccattcacacatcttcaccctcagtttcctcacttgaggagtgggatggggagaacagagagtagctgtgtttgaatccctgtaggaaatggtgaagcatagctctgggtctcctgggggagaccaggcttggctgcgggagagctggctgttgctggactacatgctggccactgctgtgaccacgacactgctggggcagcttcttccacagtgatgcctactgatgcttcagtgcctctgcacaccgcccattccacttcctccttccccacagggcaggtggggaagcagtttggcccagcccaaggagaccccatcttgagccttatttcctaatgggtccacctctcatctgcatctttcacacctcccagcttctgcccaaccttcagcagtgacaagtccccaagagactcgcctgagcagcttgggctgcttttcatttccacctgtcaggatgcctgtggtcatgctctcagctccacctggcatgagaagggatcctggcctctggcatattcatcaagtatgagttctggggatgagtcactgtaatgatgtgagcagggagccttcctccctgggccacctgcagagagctttcccaccaactttgtaccttgattgccttacaaagttatttgtttacaaacagcgaccatataaaagcctcctgccccaaagcttgtgggcacatgggcacatacagactcacatacagacacacacatatatgtacagacatgtactctcacacacacaggcaccagcatacacacgtttttctaggtacagctcccaggaacagctaggtgggaaagtcccatcactgagggagcctaaccatgtccctgaacaaaaattgggcactcatctattccttttctcttgtgtccctactcattgaaaccaaactctggaaaggacccaatgtaccagtatttatacctctaatgaagcacagagagaggaagagagctgcttaaactcacacaacaatgaactgcagacacagctgttctctccctctctccttcccagagcaatttatactttaccctcaggctgtcctctggggagaaggtgccatggtcttaggtgtctgtgccccaggacagaccctaggaccctaaatccaatagaaaatgcatatctttgctccactttcagccaggctggagcaaggtaccttttcttaggatcttgggagggaatggatgcccctctctgcatgatcttgttgaggcatttagctgccatgcacctgtccccctttaatactgggcattttaaagccatctcaagaggcatcttctacatgttttgtacgcattaaaataatttcaaagatatctgagaaaagccgatatttgccattcttcctatatcctggaatatatcttgcatcctgagtttataataataaataatattctaccttggaaaaaaaaaaaaaaa

SEQ ID NO: 170 - DNA, 7561 bp, Homo sapiens
gtgagctgaagcagggcagggcatcaactcacccaggaagtgcaaggggtttggggattttcctttcctagccaagggaaggcatgacagactgtacctggaaaaacaggacactcttgcccaaatactgcactttttgcacagtcttagcaactggcagaccaggagattctctcctgtgcctgattcattgggtcccacacccatagggccttgcttactgccagtgcagcagtctgagattaacaccccatccccgggagaactctaagaaggagctgatgtggaggagcagctgagacagttcaagatgacgaccacagtagccacagactatgacaacattgagatccagcagcagtacagtgatgtcaacaaccgctgggatgtcgacgactgggacaatgagaacagctctgcgcggctttttgagcggtcccgcatcaaggctctggcagatgagcgtgaagccgtgcagaagaagaccttcaccaagtgggtcaattcccaccttgcccgtgtgtcctgccggatcacagacctgtacactgaccttcgagatggacggatgctcatcaagctgctggaggtcctctctggagagaggctgcctaaacccaccaagggacgaatgcgcatccactgcttagagaatgtggacaaggcccttcagttcctgaaggagcagagagtccatcttgagaacatggggtcccatgacatcgtggatggaaaccaccggctgacccttggcctcatctggaccatcatcctgcgcttccagatccaggatatcagtgtggaaactgaagacaacaaagagaagaaatctgccaaggatgcattgctgttgtggtgccagatgaagacagctgggtaccccaatgtcaacattcacaatttcaccactagctggagggacggcatggccttcaatgcactgatacacaaacaccggcctgacctgatagattttgacaaactaaagaaatctaacgcacactacaacctgcagaatgcatttaatctggcagaacagcacctcggcctcactaaactgttggaccccgaagacatcagcgtggaccatcctgatgagaagtccataatcacttatgtggtgacttattaccactacttctctaagatgaaggccttagctgttgaaggaaaacgaattggaaaggtgcttgacaatgctattgaaacagaaaaaatgattgaaaagtatgaatcacttgcctctgaccttctggaatggattgaacaaaccatcatcattctgaacaatcgcaaatttgccaattcactggtcggggttcaacagcagcttcaggcattcaacacttaccgcactgtggagaaaccacccaaatttactgagaaggggaacttggaagtgctgctcttcaccattcagagcaagatgagggccaacaaccagaaggtctacatgccccgggaggggaagctcatctctgacatcaacaaggcctgggaaagactggaaaaagcggaacacgaaagagaactggctttgcggaatgagctcataagacaggagaaactggaacagctcgcccgcagatttgatcgcaaggcagctatgagggagacttggctgagcgaaaaccagcgtctggtgtctcaggacaactttgggtttgaccttcctgcagttgaggccgccacaaaaaagcacgaggccattgagacagacattgccgcatacgaggagcgtgtgcaggctgtggtagccgtggccagggagctcgaggccgagaattaccacgacatcaagcgcatcacagcgaggaaggacaatgtcatccggctctgggaatacctactggaactgctcagggcccggagacagcggctcgagatgaacctggggctgcagaagatattccaggaaatgctctacattatggactggatggatgaaatgaaggtgctagtattgtctcaagactatggcaaacacttacttggtgtggaagacctgttacagaagcacaccctggttgaagcagacattggcatccaggcagagcgggtgagaggtgtcaatgcctccgcccagaagttcgcaacagacggggaaggttacaagccctgtgacccccaggtgatccgagaccgcgtggcccacatggagttctgttatcaagagctttgccagctggcggctgagcgcagggcccgtctggaagagtcccgccgcctctggaagttcttctgggagatggcagaagaggaaggctggatacgggagaaggagaagatcctgtcctcggacgattacgggaaagacctgaccagcgtcatgcgcctgctcagcaagcaccgggcgttcgaggacgagatgagcggccgcagtggccactttgagcaggccatcaaggaaggcgaagacatgatcgcggaggagcacttcgggtcggagaagatccgtgagaggatcatttacatccgggagcagtgggccaacctagagcagctctcggccattcggaagaagcgcctggaggaggcctccctgctgcaccagttccaggcagatgctgatgacattgatgcctggatgctggacatcctcaagattgtctccagcagcgacgtgggccacgatgagtattccacacagtctctggtcaagaaacacaaggacgtggcggaagagatcgccaattacaggcccacccttgacacgctgcacgaacaagccagcgccctcccccaggagcatgccgagtctccagacgtgaggggcaggctgtcgggcatcgaggagcggtataaggaggtggcagagctgacgcggctgcggaagcaggcactccaggacactctggccctgtacaagatgttcagcgaggctgatgcctgtgagctctggatcgacgagaaggagcagtggctcaacaacatgcagatcccagagaagctggaggatctggaggtcatccagcacagatttgagagcctagaaccagaaatgaacaaccaggcttcccgggttgcagtggtgaaccagattgcacgccagctgatgcacagcggccacccaagtgagaaggaaatcaaagcccagcaggacaaactcaacacaaggtggagccagttcagagaactggttgacaggaagaaggatgccctcctgtctgccctgagcatccagaactaccacctcgagtgcaatgaaaccaaatcctggattcgggaaaagaccaaggtcatcgagtccacccaggacctgggcaatgacctggctggcgtcatggccctgcagcgcaagctgaccggcatggagcgggacttggtggccattgaggcaaagctgagtgacctgcagaaggaggcggagaagctggagtccgagcaccccgaccaggcccaggccatcctgtctcggctggccgagatcagcgacgtgtgggaggagatgaagaccaccctgaaaaaccgagaggcctccctgggagaggccagcaagctgcagcagttcctacgggacttggacgacttccagtcctggctctctaggacccagacagcgatcgcctcggaggacatgccaaacaccctgaccgaggctgagaagctgctcacgcagcacgagaacatcaagaatgagatcgacaactacgaggaggactaccagaagatgagggacatgggcgagatggtcacccaggggcagaccgatgcccagtacatgtttctgcggcagcggctgcaggccctggacactggatggaacgagctccacaagatgtgggagaacagacaaaatctcctatcccagtcacatgcctaccagcagttcctcagagacacgaagcaagccgaagcctttcttaacaaccaggagtatgttctggctcacactgaaatgcctaccaccttggaaggagctgaagcagcaattaaaaagcaagaggacttcatgaccaccatggacgccaatgaggagaagatcaatgctgtggtggagactggccggaggctggtgagcgatgggaacatcaactcagatcgcatccaggagaaggtggactctattgatgacagacataggaagaatcgtgagacagccagtgaacttttgatgaggttgaaggacaacagggatctacagaaattcctgcaagattgtcaagagctgtctctctggatcaatgagaagatgctcacagcccaggacatgtcttacgatgaagccagaaatctgcacagtaaatggttgaagcatcaagcatttatggcagaacttgcatccaacaaagaatggcttgacaaaatcgagaaggaaggaatgcagctcatttcagaaaagcctgagacggaagctgtggtgaaggagaaactcactggtttacataaaatgtgggaagtccttgaatccactacccagacaaaggcccagcggctctttgatgcaaacaaggccgaacttttcacccagagctgtgcagatctagacaaatggctgcacggcctggagagtcagattcagtctgatgactatggcaaacacctgaccagtgtcaatatcctgctgaaaaagcaacagatgctggagaatcagatggaagtgcggaagaaggagatcgaagagctccaaagccaagcccaggccctgagtcaggaagggaagagcaccgacgaggtagacagcaagcgcctcaccgtgcagaccaagttcatggagttgctggagcccttgaacgagaggaagcataacctgctggcctccaaagagatccatcagttcaacagggatgtggaggacgagatcttgtgggttggagagaggatgcctttggcaacttccacggatcatggccacaacctccagactgtgcagctgttaataaagaaaaatcagaccctccagaaagaaatccaggggcaccagcctcgcattgacgacatctttgagaggagccaaaacatcgtcactgacagcagcagcctcagcgctgaggccatcagacagaggcttgccgacctgaagcagctgtggggtctcctcattgaggagacagagaaacgccacaggcggctggaggaggcgcacagggcccagcagtactactttgacgctgctgaggccgaagcctggatgagcgagcaggagctgtacatgatgtcagaggagaaggccaaggatgagcagagtgctgtctccatgttgaagaagcaccagatcttagaacaagctgtggaggactatgcagagaccgtgcatcagctctccaagaccagccgggccctggtggccgacagccatcctgaaagtgagcgcattagcatgcggcagtccaaagtggataaactgtacgctggtctgaaagaccttgctgaagagagaagaggcaagctggatgagagacacaggttattccagctcaaccgggaggtggacgacctggagcagtggatcgctgagagggaggtggtcgcagggtcccatgaactgggacaggactatgagcatgtcacgatgttacaagaacgattccgggagtttgcccgagacaccgggaacattgggcaggagcgcgtggacacggtcaatcacctggcagatgagctcatcaactctggacattcagatgccgccaccatcgctgaatggaaggatggcctcaatgaagcctgggccgacctcctggagctcattgacacaagaacacagattcttgccgcttcctatgaactgcacaagttttaccacgatgccaaggagatctttgggcgtatacaggacaaacacaagaaactccctgaggagcttgggagagatcagaacacagtggagaccttacagagaatgcacactacatttgagcatgacatccaggctctgggcacacaggtgaggcagctgcaggaggatgcagcccgcctccaggcggcctatgcgggtgacaaggccgacgatatccagaagcgcgagaacgaggtcctggaagcctggaagtccctcctggacgcctgtgagagccgcagggtgcggctggtggacacaggggacaagttccgcttcttcagcatggtgcgcgacctcatgctctggatggaggatgtcatccggcagatcgaggcccaggagaagccaagggatgtatcatctgttgaactcttaatgaataatcatcaaggcatcaaagctgaaattgatgcacgtaatgacagtttcacaacctgcattgaacttgggaaatccctgttggcgagaaaacactatgcatctgaggagatcaaggaaaaattactgcagttgacggaaaagaggaaagaaatgatcgacaagtgggaagaccgatgggaatggttaagactgattctggaggtccatcagttctcaagagacgccagtgtggccgaggcctggctgcttggacaggagccgtacctatccagccgagagataggccagagcgtggacgaggtggagaagctcatcaagcgccacgaggcatttgaaaagtctgcagcaacctgggatgagaggttctctgccctggaaaggctgactacattggagttactggaagtgcgcagacagcaagaggaagaggagaggaagaggcggccgccttctcccgagccgagcacgaaggtttcagaggaagccgagtcccagcagcagtgggatacttcaaaaggagaacaagtttcccaaaacggtttgccagctgaacagggatctccacggatggcagaaacggtggacacaagcgaaatggtcaacggcgctacagaacaaaggacgagctctaaagagtccagccccatcccctccccgacctctgatcgtaaagccaagactgccctcccagcccagagtgccgccaccttaccagccagaacccaggagacaccttcggcccagatggaaggcttcctcaatcggaaacacgagtgggaggcccacaataagaaagcctcaagcaggtcctggcacaatgtttattgtgtcataaataaccaagaaatgggtttctacaaagatgcaaagactgctgcttctggaattccctaccacagcgaggtccctgtgagtttgaaagaagctgtctgcgaagtggcccttgattacaaaaagaagaaacacgtattcaagctaagactaaatgatggcaatgagtacctcttccaagccaaagacgatgaggaaatgaacacatggatccaggctatctcttccgccatctcctctgataaacacgaggtgtctgccagcacccagagcacgccagcatccagccgcgcgcagaccctccccaccagcgtcgtcaccatcaccagcgagtccagtcccggcaagcgggaaaaggacaaagagaaagacaaagagaagcggttcagcctttttggcaaaaagaaatgaactcctttccttcacctcctgcccttctcttaccttttcagtgaaattccagcatgcaagctcagaaccaacacattactctctgtgcctaatgttcctcaatgtggttgatttatttttttttttaatttatagagcatttcggggggggtgggg

SEQ ID NO: 171 - DNA, 2432 bp, Homo sapiens
cttcccaccgccagaacgtgcaaataggggataatcagccctgcacggccatcctcagcaatgctgcttatttaacccattttttaaaatgacacttaatgttattggctggcgtacgtgtgtgcgcatacttaaaagttgatgcgtggtgcagctctgctgctaatgtctgctgacagcgtcgcccgatgttgctcagggcctctgggaagaggggacacctttgatgtgggcgtgctggcacccaagaggcaacgtggtcaggctcgatgcttgccagccctggaaggtcccgccagggttggggggtcgggtgagcactcagagatctggggaggaagcgaggagcctggtgtcctcaccaggtgcagaggggaaatgcgtactgctccagaaggttctgactcaagtctcggccctgaggactcagaactcacaagtcatggatcaagtacagagggagggagggccccagcccacccctgcgggggaggaggagggtctgaaggtgggagggcagctccatgagcagccactgttcctgaccagccgaagtgccaggcagggggaggtttccatgtccaggagggagaggacctccaccctctgacctttcagttttccatagcagcccagtgtgaagctcggcgggggtgggcagggcatcaggacaagatgaagatgctggctctggaatggggactccccttgggctaaggggtagtggctggcagaggttgcccagctcttttggaggccacagggaatagaggtggggtggtgcttccgttcctgtgaggcccgcccccctgagccccctcgtctgcttcttgtttggcagaaatagatgtggggcacagcccctagatgatgggaatctgcccaagctgtgccctctggggaatgaaatcttgctcctcgtgcagcttcccctttcccttgcggggtgggggctgggggtgccaaggctccacccttggagggggttgctgggggtgccaaggctccaccctttgctcgctgggcagagggaaggaagcacctccctgtatgctctgcaggggcccctgcaggccactttgcctcagaggaaggaggagaggtcccctgggaaaatgcgcacacacacacacacacacacacacacacacacgcacatgcacacacgcacgcatgcacacacacacacacatatgtgcaggggtgcagcctaagtcagtggagccaggactggctgcgcagctgggcctgccccattcttggagtccccagggaatgagcctcaggatccacttcgtcccttgtttctaagccaggctgcacggccgttcctgggtgtgaaagcattctgtcctgtctccagtcagagggaaccgcccccaaactagaaagctaatttcccccgaaggttcatgaagccagaggcatgcccttgggggttggtcgggagaagggtgagaggcagtgctgtggaaggggcctggcccctgctgcctgcgattccccccgggtatgtggccttctgcctccttcagcctcagtttcctcacctgtaacatgagaataatgatgcctgcctgcccaggccacctcctgggagtgcattggggactctaagtgtaaaactgtcatgaggatggtttatgaagtcccagggaccacacctgccactcagggaagagaccgctgacctcagccatcagccgtgtgcatcgtgaggggcagcgagctcaggacggagagctctcccttggttcggagtcagcacacctgcactcccacacgcccacccagctgtgtgtcctccgccgagggcgagcctctctgtgactcttctgtaaaatgcaccccattctgcccactcctgccacgagacccatcctctgcgatcccgccaggcatgtgtgtgtgaatgcatgtgcaaagctctccatcagaagggtggtgtgggccctgcaggtcctacccctcggccttgaagctccctcgggctgcggactctgcctcctgggtctgagcattagaaccaggagaggggtgtccctgggcagagccaggggtgcaaacagcctgcagccatctggccttttaagtatagtgtgtcgcatttccgggtaggaaggtagcatttcaagttcaaagagaggtcaagtcatgcaaccatctttcctccagcacttttggggtaaggaggacagtttttgttatggtttaggggaaattttcatgaaatttccaccattaccaatagattactgatgtccatggcaagtgatctgttcttggtattttgttttgttttgttttggtttttaaatgtaatcacccattggtcaggcccaggactggtcaccatgagctctgctagccacggccccaacgatgcttccggctctcatggattccacagcaaataaaactgtactgacaac

SEQ ID NO: 172 - DNA, 2242 bp, Homo sapiens
ggcacgaggcgctcttcggggcccgggtggtctggaacaatgttgcttggctgggcggctgcgggatagggcggaaggggacaggcttgaggcttggataggcgtgaggaggcgcatacgaccgcacaacccgaggtttgtaactgtattcggaagacgccgggtccggctgggactgccagaggaacctggctttgcaggactacggaggagtaacgtcgagtgaattggaagagggcccagggccgcacaagcagcgtcaccctttacaccagaaagctggcgggcactatggggaaaaaacaaaacaagaagaaagtggaggaggtgctagaagaggaggaagaggaatatgtggtggaaaaagttctcgaccgtcgagtggtaaagggcaaagtggagtacctcctaaagtggaagggattctcagatgaggacaacacatgggagccagaagagaacctggattgccccgacctcattgctgagtttctgcagtcacagaaaacagcacatgagacagataaatcagagggaggcaagcgcaaagctgattctgattctgaagataagggagaggagagcaaaccaaagaagaagaaagaagagtcagaaaagccacgaggctttgctcgaggtttggagccggagcggattattggagctacagactccagtggagagctcatgttcctgatgaaatggaaaaactctgatgaggctgacctggtccctgccaaggaagccaatgtcaagtgcccacaggttgtcatatccttctatgaggaaaggctgacgtggcattcctacccctcggaggatgatgacaaaaaagatgacaagaactaacgctcctgagtaccagcccctgtcacatctgactgtgggtttcaagtgggaagggaaggagttctacttgtcttgacaccatagaggtggcttgagaagatgtcctttgaagagccagtatagtttctgtgccctgcagcagcccaagtgctttaaagccgtttcaagctgtatagtttgcacacccatcccagtggaggggaaaggggataagtgtttcaaggcaaccttttctgcactttgctgcgaaaagcaaagggccttctatgaaggacaaaacttgcagaattgggtgtgtgggagagcaaaaaaatactgtagatcttcaaagagcatctccacaacccacagccttcttcccaatagtgttaactctgcatttttacagcgtagcatgtgtgtagtttttggctattactggtgtattatttgggggagggagggatggggaggggagaaagggagatgggtagcatcattttgattaacatttggggcctgataggggaaatggtgaagcaatggaaaagaacagacaactaatgatttgcttctatgtccagaatattttacctttaaaaaaatgtcattggcaccataaataaggactgtgagagactgtttaaaagctgtgaaagtctgaaacctataagccaaggtgttccctgcctaaacttattgctgttcccacaaaggactaagcctgttcataagttaccaaagttgccattttggagatggaaattgacgaggagggaaggtcttttattggagagtatacagtacaagcagatcattctgccttagaggtgctaattcccgaaattagaagaccctttcttttccagtaatgaagttataaatatcagcttgttcatccaagccactggctgaggtgttaggaagaggaagagggtggtagaggaggtaagacagtagggaaagacaagggcccatgctcttagtggggaaaactcttggagccgtttactttgagctttgaacactgaaaccattgttggcagggttcagtcactgacagcacaagtttcactgaattgatccaagagtttagtgatttcaaaagccttggtctcaggagaagattaaactttcatattgggcagtggttcactttaaaacacacacatacacacacaaaacaattttttaagaaatcctaataagtaacatacccaaaatgctctgtcttgagtcatgagaaccatcagttcttgatattgtctagacttgcatctagagctacgttgtaaaattcttttaggcatgtgttagatttctgtgtaaactttgtttaaatgtaaacttcatactacattgtcagtttttgtcttaataaaactatagatttataaaaaaaaaaaaaaaaaaa

SEQ ID NO: 173 - DNA, 7758 bp, Homo sapiens
cagaggtctagcagccgggcgccgcgggccgggggcctgaggaggccacaggacgggcgtcttcccggctagtggagcccggcgcggggcccgctgcggccgcaccgtgaggggaggaggccgaggaggacgcggcgccggctgccggcgggaggaagcgctccaccagggcccccgacggcactcgtttaaccacatccgcgcctctgctggaaacgcttgctggcgcctgtcaccggttccctccattttgaaagggaaaaaggctctccccacccattcccctgcccctaggagctggagccggaggagccgcgctcatggcgttcagcccgtggcagatcctgtcccccgtgcagtgggcgaaatggacgtggtctgcggtacgcggcggggccgccggcgaggacgaggctggcgggcccgagggcgaccccgaggaggaggattcgcaagccgagaccaaatccttgagtttcagctcggattctgaaggtaattttgagactcctgaagctgaaaccccgatccgatcacctttcaaggagtcctgtgatccatcactcggattggcaggacctggggccaaaagccaagaatcacaagaagctgatgaacagcttgtagcagaagtggttgaaaaatgttcatctaagacttgttctaaaccttcagaaaatgaagtgccacagcaggccattgactctcactcagtcaagaatttcagagaagaacctgaacatgattttagcaaaatttccatcgtgaggccattttcaatagaaacgaaggattccacggatatctcggcagtcctcggaacaaaagcagctcatggctgtgtaactgcagtctcaggcaaggctctgccttccagcccgccagacgccctccaggacgaggcgatgacagaaggcagcatgggggtcaccctcgaggcctccgcagaagctgatctaaaagctggcaactcctgtccagagcttgtgcccagcagaagaagcaagctgagaaagcccaagcctgtccccctgaggaagaaagcaattggaggagagttctcagacaccaacgctgctgtggagggcacacctctccccaaggcatcctatcacttcagtcctgaagagttggatgagaacacaagtcctttgctaggagatgccaggttccagaagtctccccctgacattaaagaaactcccggcactctcagtagtgacaccaacgactcaggggttgagctgggggaggagtcgaggagctcacctctcaagcttgagtttgatttcacagaagatacaggaaacatagaggccaggaaagcccttccaaggaagcttggcaggaaactgggtagcacactgactcccaagatacaaaaagatggcatcagtaagtcagcaggtttagaacagcctacagacccagtggcacgagacgggcctctctcccaaacatcttccaagccagatcctagtcagtgggagagccccagcttcaacccctttgggagccactctgttctgcagaactccccacccctctcttctgagggctcctaccactttgacccagataactttgacgaatccatggatccctttaaaccaactacgaccttaacaagcagtgacttttgttctcccactggtaatcacgttaatgaaatcttagaatcacccaagaaggcaaagtcgcgtttaataacgagtggctgtaaggtgaagaagcatgaaactcagtctctcgccctggatgcatgttctcgggatgaaggggcagtgatctcccagatttcagacatttctaatagggatggccatgctactgatgaggagaaactggcatccacgtcatgtggtcagaaatcagctggtgccgaggtgaaaggtgagccagaggaagacctggagtactttgaatgttccaatgttcctgtgtctaccataaatcatgcgttttcatcctcagaagcaggcatagagaaggagacgtgccagaagatggaagaagacgggtccactgtgcttgggctgctggagtcctctgcagagaaggcccctgtgtcggtgtcctgtggaggtgagagccccctggatgggatctgcctcagcgaatcagacaagacagccgtgctcaccttaataagagaagagataattactaaagagattgaagcaaatgaatggaagaagaaatacgaagagacccggcaagaagttttggagatgaggaaaattgtagctgaatatgaaaagactattgctcaaatgattgaagatgaacaaaggacaagtatgacctctcagaagagcttccagcaactgaccatggagaaggaacaggccctggctgaccttaactctgtggaaaggtccctttctgatctcttcaggagatatgagaacctgaaaggtgttctggaagggttcaagaagaatgaagaagccttgaagaaatgtgctcaggattacttagccagagttaaacaagaggagcagcgataccaggccctgaaaatccacgcagaagagaaactggacaaagccaatgaagagattgctcaggttcgaacaaaagcaaaggctgagagtgcagctctccatgctggactccgcaaagagcagatgaaggtggagtccctggaaagggccctgcagcagaagaaccaagaaattgaagaactgacaaaaatctgtgatgagctgattgcaaagctgggaaagactgactgagacactccccctgttagctcaacagatctgcatttggctgcttctcttgtgaccacaattatcttgccttatccaggaataattgcccctttgcagagaaaaaaaaaaaacttaaaaaaagcacatgcctactgctgcctgtcccgctttgctgccaatgcaacagccctggaagaaaccctagagggttgcatagtctagaaaggagtgtgacctgacagtgctggagcctcctagtttccccctatgaaggttcccttaggctgctgagtttgggtttgtgatttatctttagtttgttttaaagtcatctttactttcccaaatgtgttaaatttgtaactcctctttggggtcttctccaccacctgtctgatttttttgtgatctgtttaatcttttaattttttagtatcagtggttttatttaaggagacagtttggcctattgttacttccaatttataatcaagaaggggctctggatccccttttaaattacacacactctcacacacatacatgtatgtttatagatgctgctgctcttttccctgaagcatagtcaagtaagaactgctctacagaaggacatatttccttggatgtgagaccctattttgaaatagagtcctgactcagaacaccaacttaagaatttgggggattaaagatgtgaagaccacagtcttgggttttcatatctggagaagactatttgccatgacgttttgttgccctggtatttggacactcctcagctttaatgggtgtggcccctttagggttagtcctcagactaatgatagtgtctgctttctgcatgaacggcaatatgggactccctccaagctagggtttggcaagtctgccctagagtcatttactctcctctgcctccatttgttaatacagaatcaacatttagtcttcattatctttttttttttttttgagacagagtttcgatctattttaagtatgtgaagaaaatctacttgtaaaaggctcagatcttaattaaaaggtaattgtagcacattaccaattataaggtgaagaaatgttttttcccaagtgtgatgcattgttcttcagatgttgaaaagaaagcaaaaaataccttctaacttaagacagaatttttaacaaaatgagcagtaaaagtcacatgaaccactccaaaaatcagtgcattttgcatatttttaaacaaagacagcttgttgaatactgagaagaggagtgcaaggagaaggtctgtactaacaaagccaaattcctcaagctcttactggactcagttcagagtggtgggccattaaccccaacatggaatttttccatataaatctcaatgaattccctttcatttgaataggcaaacccaaatccatgcaagtgttttaaagcactgtcctgtcttaatcttacatgctgaaagtcttcatggtgatatgcactatattcagtatacgtatgttttcctacttctcttgtaaaactgttgcatgatccaacttcagcaatgaattgtgcctagtggagaacctctatagatcttaaaaaatgaattattctttagcagtgtattactcacatgggtgcaatctttagccccagggaggtcaataatgtcttttaaagccagaagtcacattttaccaatatgcatttatcataattggtgcttaggctgtatattcaagcctgttgtcttaacattttgtataaaaaagaacaacagaaattatctgtcatttgagaagtggcttgacaatcatttgagctttgaaagcagtcactgtggtgtaatatgaatgctgtcctagtggtcatagtaccaagggcacgtgtctccccttggtataactgatttcctttttagtcctctactgctaaataagttaattttgcattttgcagaaagaaacattgattgctaaatctttttgctgctgtgttttggtgttttcatgtttacttgttttatattgatctgttttaagtatgagaggcttatagtgccctccattgtaaatccatagtcatctttttaagcttattgtgtttaagaaagtagctatgtgttaaacagaggtgatggcagcccttccctagcacactggtggaagagaccccttaagaacctgaccccagtgaatgaagctgatgcacagggacgaccaaaggaccttcgttaagtgataattgtcctggcctctcagccatgaccgttatgaggaaatatcccccattcgaacttaacagatgcctcctctccaaagagaattaaaatcgtagcttgtacagatcaagagaatatactgggcagaatgaagtatgtttgtttatttttctttaaaaataaaggattttggaactctggagagtaagaatatagtatagagtttgcctcaacacatgtgagggccaaataacctgctagctaggcagtaataaactctgttacagaagagaaaaagggccgggcacagtggcttattcctgtaatcccaacactgtggaaggccgaggcaggaggatcacttgagtccaggagtttgaaacctacctaggcaacatggtgaaaccttgtctctaccaaaataaaaattagctgggcatggtggcacgtgcctgtggtcccagctacttgggaggctgaggtgggagcctgggaggtcaaggctgcagtgagccatgatcatgccactgcactccatcctgggtgacagcaagatcttgtctcaaaaaaaaaaaaaaaaaccaggagtgaaaaaggaaagtagaaggcagctgctggcctagatgttggtttgggaatattaggtgatcctgttgagattctggatccagagcaatttctttagcttttgactttgccaaagtgtagatagcctttatccagcagtattttaagtggggaatgcaacgtgaggccaactgaacaattccccccgtggctgcccagatagtcacagtcaaggttggagagtctccttccagccagtgacctacccaaaccttttgttctgtaaaactgctctggaaataccgggaagcccagttttctcacgtggtttctagcttcttcagactcagcccaaattaggaagtgcagaagcacatgatggtgaaaaacctaggatttggcagccttccagaatggtatggaatctgagggaagatttatgtttcgttttggaggatagctcaagttgaattttctttccagccagttaccctttcaacctacccatactttgtacaactcttacacaaatacttagatatttattagatagccctgaattcactctaattataaacagggagtgtaaactgcccccagatgttcctgggctgggtaaaagcagctggagtgaagcactcattttccataaaggtaacaaagggcagctcagtggttactcaagctcaaaagggtttttttaagagcaagcattggttaagtctgtgtatactgagttggaagtgatttcagcacattcttttttagtgggagtgaaagttctgaagcccccttttaacttcctcttggtttttcattataattggtagccatctcatgaactgtctctgactgttgtctctttgtggtcatgtgattgtgagcttgctttctgacttgcatttctgactttatcctgttgttaggaagatagaaactaggttttgaaagattacatgattcaagcgagggattttaaagtaaagatgtatttattctgaagaatctaaaagataacagattatttgcttatgaaagaacaatatagtctgggaatcccagaatgtcaagccaaaggtctaagaagtcatctccttcaaatactttaataaagaagtatttcgaggagatatctgtccaaaaaggtttgactggcctccagattccagttatttttaaaaagcaacttaccactaaatccttgagtctccatagagtaacagtaaagaaactgatgtaacagactctcctctcaaaggatctcctctggaagagactatcagcggcagatctctccagggaagacccatcccctagtgccagagcttgcatcctggagactaaagattgcacttttttgtagttttttgtccaaatgcaatcccatttctgtgcctcttagcatgcagttagatttggacaaacaagattcctaaggaatgactttattaactataatatggttacagctattatataaatatatattctggttatagttctaatatggagatgttgtgtgcaatgctggcctgtggtggtctgtgtaatgctttaacttgtatggaggaggccaggctcagagctgagatgtggcctgaaccttccctgtatcgatcctttaatttagaactgtcaagatgtcactttctccccctctgccttttagtggtatctgacatatactcaaaacagtaatttcctggtcacatcattaactgctaattctgtatttataaagaattttcagatggacatgtacaaatttgaactcaaaccatccccagtccagatacagggcagcgtgtaggtgaccacaccagagcctcagcctcggtccttctcagccgtcgggataggatccaggcatttcttttaaatctcagaggtagcagtaaacttttcagtattgctgttagcaagtgtgtgtttgccaatagatacccattatactaatgtgccaagtaaatgttcattgcacatctgcttccactgtgttcccacgggtgccatgaagtgtgtgaggagcccctcatctggagggatgagtgctgcgttgactactgctatcaggattgtgttgtgtggaatattcatctacataaattttatatgcacagtaatttccctttttatatgtcaagtaactatttgtaaaagttatactcacaaattattataatgattactaatatattttttccatgtttcattgcctgaataaaaactgtttaccactgttaaaaaaaaaaaaaaaaaaaaaaa

SEQ ID NO: 174 - DNA, 2423 bp, Homo sapiens
attttttttttttttgctggaatttgttttctcagtactgaaaagagaaaaagtgacaatcttgtatttttaaaagcctcggaaaggtgataccatctgacagtcattttctcacgttggtcttctaaagtcacctatttcttgtgtgtgcacatcacaccatttcctgtttctttataacccgacaagggtaggagtgcctgtttcccctgctgggcacaccagacaatcgtaatcacaaaacagacactgagccaggggcccaaagggtgtgatcatgagagttaccgggacagcagtaggcatgacagtcaccaggaaggacaagggtgctctgttgttagtggccacacaccaatttgacaaggagtgttgcgaaatttttatttatttatttatttattttgagatggagtttcactcttgttgcccaggctggagtgcggtggtacaatctcggctcactgcaacctccacctcccaggttcaagcgattctcctgcctcagcctcccaagtacctgggactacaggtgcgtgccaccacacccagctaaattttgtgtttttagtagagatggggtttcaccatgttggccaggatggtcttgaacccctgacctcatgatctgcctgcctcggcctcccaaagtgctgggattacaggcatgagccaccacgcccagccaaaatatttttttaaagtcattttccttaagctgcttgggctacatgtgaaatacactggacggtcaacattcctgtctcctcccatttgggctgatgcagcagatccagggaatgttacctgtttctgctgctagaagatccaggaaattgggaaggttacctgacgcacacatggatgaaggccatcatctagaaatggggtcaaccacaattgtgttaattccgtagtgtcagggattcttcgggaaggtcaacagtatgaaggattctgacccctgtgcctcccatttatgtgatcaggtgacagttaataaccgtggaggtcacactcagccatccaacagccttacagtgaccctacacaaaagcccccaaattccaaagactttttcttaacctaaaggaagaaattatttgttaattccagtagagcaactgaatatactgggctatttgtacttttttatagagaactttaataataattctttaaaaatgagtttttagaacaaagcaactgacgatttcctaagattccaatgccctggagcttgtaggaggacttagcctgggtcagctggagcacccccgacctgatctcccactgccagattttcccatgctcctagggtatggagtccacgtgggaatgactgcaagttcaggtggaacttggccgactgatgctctgcgagtttttaatagacactggggacaactgcttaaggtttagaaacttccaaaccacaggaaagacattttcagtgtcccccatccagaggcagccctggaataggattcccaggggtttctgggacccctttccttgctccgtgaggctctgtggccatcttttggcaggaggaggatgcttccttggctctgtgcccagacccgcctggtccccaggtctctcaccttgggtgaagattcagagatgccctgtaaggattttgcccactgggcaactcagaaatacttcgatctcccaagatataagaggcagcagcaaacgtgcctattgacgtctgtttcatagttaccacttacgcgagtagacagaactcggcttttcagaaaataggtgtcaagtccactttataagaacctttttttctaaaataagataaaaggtggctttgcattttctgattaaacgactgtgtctttgtcacctctgcttaactttaggagtatccattcctgtgattgtagacttttgttgatattcttcctggaagaatatcattcttttcttgaagggttggtttactagaatattcaaaatcaatcatgaaggcagttactattttgagtctaaaggttttctaaaaattaacctcacatcccttctgttagggtctttcagaatatcttttataaacagaagcatttgaagtcattgcttttgctacatgatttgtgtgtgtgaaggacataccacgtttaaatcattaattgaaaaacatcatataagccccaactttgtttggaggaagagacggaggttgaggtttttccttctgtataagcacctactgacaaaatgtagaggccattcaaccgtcaaacaccatttggttatatcgcagaggagacggatgtgtaaattactgcattgcttttttttttcagtttgtataacctctaatctccgtttgcatgatacgctttgttagaaacattaattgtagtttggaagcaagtgtgtatgaataaagataatgatcattc

SEQ ID NO: 175 - DNA, 3161 bp, Homo sapiens
agcgaccgcagccggggggacgcgggaggatggagcaagtggagatcctgaggaaattcatccagagggtccaggccatgaagagtcctgaccacaatggggaggacaacttcgcccgggacttcatgcggttaagaagattgtctaccaaatatagaacagaaaagatatatcccacagccactggagaaaaagaagaaaatgttaaaaagaacagatacaaggacatactgccatttgatcacagccgagttaaattgacattaaagactccttcacaagattcagactatatcaatgcaaattttataaagggcgtctatgggccaaaagcatatgtagcaactcaaggacctttagcaaatacagtaatagatttttggaggatgatatgggagtataatgttgtgatcattgtaatggcctgccgagaatttgagatgggaaggaaaaaatgtgagcgctattggcctttgtatggagaagaccccataacgtttgcaccatttaaaatttcttgtgaggatgaacaagcaagaacagactacttcatcaggacactcttacttgaatttcaaaatgaatctcgtaggctgtatcagtttcattatgtgaactggccagaccatgatgttccttcatcatttgattctattctggacatgataagcttaatgaggaaatatcaagaacatgaagatgttcctatttgtattcattgcagtgcaggctgtggaagaacaggtgccatttgtgccatagattatacgtggaatttactaaaagctgggaaaataccagaggaatttaatgtatttaatttaatacaagaaatgagaacacaaaggcattctgcagtacaaacaaaggagcaatatgaacttgttcatagagctattgcccaactgtttgaaaaacagctacaactatatgaaattcatggagctcagaaaattgctgatggagtgaatgaaattaacactgaaaacatgatcagctccatagagcctgaaaaacaagattctcctcctccaaaaccaccaaggacccgcagttgccttgttgaaggggatgctaaagaagaaatactgcagccaccggaacctcatccagtgccacccatcttgacaccttctcccccttcagcttttccaacagtcactactgtgtggcaggacaatgatagataccatccaaagccagtgttgcatatggtttcatcagaacaacattcagcagacctcaacagaaactatagtaaatcaacagaacttccagggaaaaatgaatcaacaattgaacagatagataaaaaattggaacgaaatttaagttttgagattaagaaggtccctctccaagagggaccaaaaagttttgatgggaacacacttttgaataggggacatgcaattaaaattaaatctgcttcaccttgtatagctgataaaatctctaagccacaggaattaagttcagatctaaatgtcggtgatacttcccagaattcttgtgtggactgcagtgtaacacaatcaaacaaagtttcagttactccaccagaagaatcccagaattcagacacacctccaaggccagaccgcttgcctcttgatgagaaaggacatgtaacgtggtcatttcatggacctgaaaatgccatacccatacctgatttatctgaaggcaattcctcagatatcaactatcaaactaggaaaactgtgagtttaacaccaagtcctacaacacaagttgaaacacctgatcttgtggatcatgataacacttcaccactcttcagaacacccctcagttttactaatccacttcactctgatgactcagactcagatgaaagaaactctgatggtgctgtgacccagaataaaactaatatttcaacagcaagtgccacagtttctgctgccactagtactgaaagcatttctactaggaaagtattgccaatgtccattgctagacataatatagcaggaacaacacattcaggtgctgaaaaagatgttgatgttagtgaagattcacctcctcccctacctgaaagaactcctgaatcgtttgtgttagcaagtgaacataatacacctgtaagatcggaatggagtgaacttcaaagtcaggaacgatctgaacaaaaaaagtctgaaggcttgataacctctgaaaatgagaaatgtgatcatccagcgggaggtattcactatgaaatgtgcatagaatgtccacctactttcagtgacaagagagaacaaatatcagaaaatccaacagaagccacagatattggttttggtaatcgatgtggaaaacccaaaggaccaagagatccaccttcagaatggacatgattcagggagctagaagacactttaagttatactggaaaattcaggtgccactgaaagccagatttatagtattccatctttaatatgtgggactaacagcagtgtagattgttaccttaatattttttgctgggaccatctacctgccttatactacacttaggaaaaagtattacatatggtttattttgaaacttcaagtattattgccttaatgtctcttaaccctgttacacgctgcttgtagacatgttaatatagtaatacctttatgatatattgagtttaaggactactctttttctgttttatcatgtatgcattattttgtatatgtacagggcaagtaggtatataatttgataaagttgcaattgaaatattattaacagaagatgtaagaaatttctgcatggtctaaatctttgtgtactttatttgtaaattatttgccctggagttttagaaaatagtttctgaattttaaacttgctggattcatgcagccagctttgcaggttatcagagatcaaagattgtaataataattttgtaaattgtaagcaaaaagttatttttatattatatacagtctaattgttcatcctaattgttcctgttttcatctagtcagagattcagtaagtgccttggaacaatattgaattctcttagcttgtgtgtgtttctttaatatttgaactcaagtgggattagaagactatcaaaatacatgtatgtttcaggatatttgacctgtcattaaaaaaaacaaacagttttacagtg

SEQ ID NO: 176 - DNA, 6331 bp, Homo sapiens
atctttgtttgggtctcccatactgcgtatagatgaatgggtcaggatatctggaacaaaatatggaggtgaagggtgagatcgggaaacaaagggtatggccccctagttcccaaagggagcagggagatgggaatagaattgaaggtaggttttaggctacttgggaggaggaatatttaggtaattgtggagactttctcctgtgtgatgaaggcggcagacactgtgatcctgtgggcaagaagtaaaaatgaccagctgaggatttcttttcctccaggactgtgttggggtgacaggatgcctgataaggatgacattcggctgctgccgtcagcattgggtgtgaagaagagaaaacgaggacccaagaagcagaaggagaacaagccaggaaaaccccgaaaacgcaagaagcgtgacagtgaggaggaatttggttctgagcgagatgagtaccgggagaagtcagagagtgggggcagtgaatatggaaccggaccgggtcggaaacgaagaaggaagcaccgagaaaaaaaggagaagaagacaaagcggcggaaaaagggggagggagatggggggcaaaagcaagtggaacagaagtcatcagcaactctgcttctgacctggggcctggaggatgtggagcatgtgttctctgaggaggattaccacacgctcaccaactacaaagccttcagccagttcatgaggcccctaattgctaagaagaatcctaagatcccaatgtctaagatgatgaccatccttggggccaaatggagagagttcagtgccaacaaccccttcaaggggtcagcagctgctgtggcggcggcagcggcagcagcagcagcagctgtagctgagcaggtgtcagctgctgtctcgtcggccacccccatagcaccctccggaccccccgcccttccaccaccccctgctgctgatatccagcccccacccatccgaagagccaaaaccaaagagggcaaaggtccaggccataagaggcggagtaagagcccccgagtgcctgatggacgcaagaagcttcggggaaagaaaatggcaccactcaaaataaaactagggcttctgggtggcaagaggaagaaaggaggctcgtatgtttttcagagcgacgaaggtcctgaaccagaggctgaggaatcagacctggacagtggcagtgtccacagtgcctcaggccggcctgatggccctgtccgcaccaagaaactaaagagaggccggccaggaaggaagaagaagaaggtcctgggctgtcctgcagtggccggggaggaggaggttgatggctacgagacggatcaccaggattactgtgaggtgtgccagcagggtggggaaattattctgtgtgacacctgccctcgtgcctaccacctcgtctgccttgatcctgagcttgaccgggctccagagggcaaatggagctgccctcactgtgagaaggagggggtccagtgggaggccaaggaggaagaagaagaatacgaagaggagggagaggaagaaggggagaaggaggaggaggatgatcacatggagtactgccgcgtatgcaaggacggcggggagctcctgtgctgtgacgcgtgcatctcctcctaccacattcattgtctaaaccctcccctgcctgacattcccaatggtgaatggctgtgtccccgatgcacatgccccgtgctgaagggtcgagtgcagaagatcctacattggcggtggggggagccacctgtagcagtgccagcccctcaacaggcagatggaaatccagatgtcccacccccccgtcctcttcaaggcagatcagagcgagagttctttgtcaagtgggtaggactatcctactggcactgctcctgggccaaggagcttcagctggaaatcttccatttggttatgtatcgaaactaccagcggaagaatgacatggatgagcccccacccctggactatggctccggcgaggatgatgggaagagcgacaagcgtaaagtgaaagacccgcactatgctgagatggaggagaagtactatcgttttggcatcaagccagagtggatgaccgtccaccgcatcatcaaccacagtgtggataaaaaggggaattaccactatctagtaaaatggagggacttaccatatgaccagtccacgtgggaggaagatgaaatgaatatccctgaatacgaagaacataagcaaagctactggagacaccgagaactaattatgggggaagaccctgcccagccccgcaagtataagaagaagaagaaggagctacagggtgatgggcctcccagttctcccactaatgatcctaccgtgaaatatgagactcagccacggtttatcacagccactggaggcaccctgcacatgtatcagttggaagggctgaactggctacgcttctcctgggcccagggcactgacaccattctagctgatgagatggggctaggcaagaccatacaaaccatcgtcttcctctactcactctacaaggagggccacacaaaaggtcccttcctggtgagtgccccactctctaccatcattaactgggagcgggagttccagatgtgggcacccaaattctatgtggtgacatacacgggtgacaaggacagccgggccatcattcgtgagaatgaattctcctttgaggacaatgccatcaaagggggcaagaaagcttttaagatgaaaagggaggcacaggtgaagttccatgttctcctgacatcgtatgagctgatcaccattgatcaggcagcacttggttccatccgctgggcctgtcttgtggtagatgaggcccatcgactcaagaacaaccagtccaagtttttcagggttctcaatggttacaagatagatcataagttgctgctgacaggaaccccattgcagaataatctggaggagctcttccatctcctgaacttcctcaccccagagagatttaacaacttggagggcttcctggaggagtttgctgacatatccaaagaggaccagatcaagaaactgcatgatttgctggggccacacatgctgcggagactcaaggcagatgtctttaagaacatgccagccaagacagagctcatcgttcgggtggagctaagccccatgcagaagaaatactacaaatacatcctgactcgaaattttgaggccttgaattcacgaggtggtgggaaccaggtgtcgctgcttaatatcatgatggatcttaagaagtgctgcaaccatccatacctttttcccgtggctgctatggagtcccccaaactccccagtggggcttatgagggtggggcacttattaagtcgtctgggaagctcatgctgctccagaagatgctgcgaaagctgaaggagcaaggacaccgagtgctcatcttctcgcagatgaccaaaatgttagacttgcttgaggacttcttagactatgaaggctacaagtatgagcgcatcgatggtggtatcacgggtgccctgaggcaggaggccatcgatcggtttaatgctcctggggcccaacaattctgcttcctcctgtccacccgagctgggggcctgggcatcaatctggccactgctgacactgtcatcatctttgattctgactggaacccccataatgacatccaggcctttagccgggctcatcggattggccaggccaacaaagtgatgatttaccggtttgtgactcgcgcgtcagtggaagagcgaatcacacaagtggccaagagaaagatgatgctgacacacctggttgtgcggcctgggctgggctccaaggcaggctccatgtccaagcaggagcttgacgacattctcaaatttggcactgaagagctattcaaggatgaaaacgagggggagaacaaggaggaggacagcagtgtgattcattatgacaatgaggccatcgctcggctgttggaccggaaccaggatgcaactgaggacactgacgtgcagaacatgaatgagtatctcagctccttcaaggtggcacagtacgtcgtgcgggaagaagacaagattgaggaaattgagcgagagatcatcaagcaggaggagaatgtggaccctgactactgggagaagctgctgaggcatcactatgagcaacagcaggaagacctagcccggaatctaggcaagggcaagcgggttcgcaagcaagttaactacaatgatgctgctcaggaagaccaagacaaccagtcagagtactcggtgggttcagaggaggaggatgaagacttcgatgaacgtcctgaagggcgtagacagtcaaagaggcagctccggaatgagaaagataagccactgcctccactgctggcccgagtcgggggcaacattgaggtgctgggcttcaacacccgtcagcggaaggctttcctcaatgctgtgatgcgctgggggatgccaccacaggatgccttcaccacacagtggctggtgcgggacctgaggggcaagactgagaaggagtttaaggcctatgtgtctttgttcatgcgccatctgtgtgagcctggggcagacggctctgaaacctttgccgatggggtccctcgggagggactgagtcgccagcaggtgttgacccgcattggagtcatgtctctcgtcaaaaagaaggtgcaggagtttgagcacatcaatgggcgttggtcaatgccggaactgatgcctgaccccagcgccgattctaagcgctcctccagagcctcctctcctaccaaaacgtctcccaccactcctgaggcttctgctaccaacagtccctgcacctctaaacctgctactccagctccaagtgagaaaggagaaggcataaggacacctcttgagaaggaggaagctgaaaaccaggaggaaaagccagagaagaacagcagaattggggagaagatggagacagaggctgatgcccccagcccagccccatcacttggggagcggctggagccaaggaagattcctctagaggatgaggtgccaggggtgcctggagagatggagcctgaacctgggtaccgtggggacagagagaagtcagaagatgtaaaaggtgaccgggagcttcgaccagggcctcgagatgagccacggtccaatgggcgacgagaggaaaagacagagaagccccggttcatgttcaatatcgccgatggtggcttcacagagcttcacacactgtggcagaatgaggaacgggcagctatttcctcggggaaactcaatgagatctggcacagaagacatgactattggcttctggctgggattgtcctccatggctatgcacggtggcaggacatccagaatgatgctcaatttgccattatcaacgagccatttaaaactgaagccaataaggggaactttctggagatgaaaaataagttcctggcccggaggttcaagctcctggagcaggcgctggtgattgaggagcagctgcggcgggcggcctacctgaacctgtcgcaggagccggcgcaccccgccatggccctccacgcccgcttcgccgaggccgagtgcctggccgagagccaccagcacctctccaaggagtcgctggcggggaacaagccggccaacgccgtcctgcacaaggttctgaaccagctggaggagttgctgagcgacatgaaggcggacgtgacccgcctgccagccacgctgtcccgaataccccccatcgcagcccgccttcagatgtccgagcgcagcatcctcagccggctggccagcaagggcacggagcctcaccccacaccggcctacccgccgggtccctacgctacacctccggggtacggggcggccttcagcgccgcacccgtaggggccctggccgccgcaggcgccaattacagccagatgcctgcagggtccttcatcacagccgccaccaacggcccaattcaccgattttttaaaaaagttccagaaatccagtgacgaatgtggtatacaaaaaaatatataaattctttcaacttagaataattaagtcataaaatacatagggtacaaataccacattccgttctaaaatgatatcttaggatcatcaaaagaaaaagaggatttggattatgcaaaaaatgattcctatatatataatcaattatctaactgacatttttgcaaatctaccacaacttcgccttttattgcatatgctaaacaagcagatgctaagtctgtaaactgtgaattaacctcctttttaattaattgttcg

SEQ ID NO: 177 - DNA, 1982 bp, Homo sapiens
gcagaggaggagcgcacgccggcctcgaagaacttctgcttgggtggctgaactctgatcttgacctagagtcatggccatggcaaccaaaggaggtactgtcaaagctgcttcaggattcaatgccatggaagatgcccagaccctgaggaaggccatgaaagggctcggcaccgatgaagacgccattattagcgtccttgcctaccgcaacaccgcccagcgccaggagatcaggacagcctacaagagcaccatcggcagggacttgatagacgacctgaagtcagaactgagtggcaacttcgagcaggtgattgtggggatgatgacgcccacggtgctgtatgacgtgcaagagctgcgaagggccatgaagggagccggcactgatgagggctgcctaattgagatcctggcctcccggacccctgaggagatccggcgcataagccaaacctaccagcagcaatatggacggagccttgaagatgacattcgctctgacacatcgttcatgttccagcgagtgctggtgtctctgtcagctggtgggagggatgaaggaaattatctggacgatgctctcgtgagacaggatgcccaggacctgtatgaggctggagagaagaaatgggggacagatgaggtgaaatttctaactgttctctgttcccggaaccgaaatcacctgttgcatgtgtttgatgaatacaaaaggatatcacagaaggatattgaacagagtattaaatctgaaacatctggtagctttgaagatgctctgctggctatagtaaagtgcatgaggaacaaatctgcatattttgctgaaaagctctataaatcgatgaagggcttgggcaccgatgataacaccctcatcagagtgatggtttctcgagcagaaattgacatgttggatatccgggcacacttcaagagactctatggaaagtctctgtactcgttcatcaagggtgacacatctggagactacaggaaagtactgcttgttctctgtggaggagatgattaaaataaaaatcccagaaggacaggaggattctcaacactttgaatttttttaacttcatttttctacactgctattatcattatctcagaatgcttatttccaattaaaacgcctacagctgcctcctagaatatagactgtctgtattattattcacctataattagtcattatgatgctttaaagctgtacttgcatttcaaagcttataagatataaatggagattttaaagtagaaataaatatgtattccatgtttttaaaagattactttctactttgtgtttcacagacattgaatatattaaattattccatattttcttttcagtgaaaaattttttaaatggaagactgttctaaaatcacttttttccctaatccaatttttagagtggctagtagtttcttcatttgaaattgtaagcatccggtcagtaagaatgcccatccagttttctatatttcatagtcaaagccttgaaagcatctacaaatctctttttttaggttttgtccatagcatcagttgatccttactaagtttttcatgggagacttccttcatcacatcttatgttgaaatcactttctgtagtcaaagtataccaaaaccaatttatctgaactaaattctaaagtatggttatacaaaccatatacatctggttaccaaacataaatgctgaacattccatattattatagttaatgtcttaatccagcttgcaagtgaatggaaaaaaaaataagcttcaaactaggtattctgggaatgatgtaatgctctgaatttagtatgatataaagaaaacttttttgtgctaaaaatactttttaaaatcaattttgttgattgtagtaatttctatttgcactgtgcctttcaactccagaaacattctaagatgtacttggatttaattaaaaagttcactttgt

SEQ ID NO: 178 - DNA, 1359 bp, Homo sapiens
ctttttggtgtaaatctggactctaattctgtaatatatcaaggaatctcgtaaaaccgacactaaaacgtccctgcctacaaatcatccggccaaattatgagttcattgtattatgcgaatgctttattttctaaatatccagcctcaagttcggttttcgctaccggagccttcccagaacaaacttcttgtgcgtttgcttccaacccccagcgcccgggctatggagcgggttcgggcgcttccttcgccggctcgatgcagggcttgtaccccggcggggggggcatggcgggccagagcgcggccggcgtctacgcggccggctatgggctcgagccgagttccttcaacatgcactgcgcgccctttgagcagaacctctccggggtgtgtcccggcgactccgccaaggcggcgggcgccaaggagcagagggactcggacttggcggccgagagtaacttccggatctacccctcgatgcgaagctcaggaactgaccgcaaacgaggccgccagacctacacccgctaccagaccctggagctggagaaggaatttcactacaatcgctacctgacgcggcggcggcgcatcgagatcgcgcacgcgctctgcctcacggaaagacagatcaagatttggtttcagaaccggcgcatgaagtggaaaaaggagaacaagaccgcgggcccggggaccaccggccaagacagggctgaagcagaggaggaagaggaagagtgagggatggagaaagggcagaggaagagacatgagaaagggagacgaagagaagcccagctctgggaactgaatcaggaaactcaaatcgaatagggaagtaaaaaaacaaaacaaaaaacaaaaaaaaacaaaaaaaaaccctatttaaatgaaaggagtttaaaaacattttttaaggagggagaaaggagaaattttggtttttcaacactgaaaaaatagtacctataggaaagtctgtcaggtttggtttttttgtacaatatgaaaaggacattatctacctgttctgtagctttctggaatttacctccccttttctatgttgctattgtaaggtctttgtaaaatcttgcagttttgtaagccctctttaatgctgtctttgtggactgtgggtctggactaaccctgtggttgcctgccctcctgtgcctccgccttcccagcagcggcaccaaggggccttagggagccccaaaacctaccactcgcgtgttccccaagcgccttgctgctgctgcttgcttcccgtcccccagccccatgctccctttacattctgtgtgtatctaaaggatggaaaaataaaacgcaattaaaaat

SEQ ID NO: 179 - DNA, 1771 bp, Homo sapiens
cgagcatggccgctccgcgagtattcccactttcctgtgcggtgcagcagtatgcctgggggaagatgggttccaacagcgaagtggcgcggctgttggccagcagtgatccactggcccagatcgcagaggacaagccttatgcagagttgtggatggggactcacccccgaggggatgccaagatccttgacaaccgcatctcacagaagaccctaagccagtggattgctgagaaccaggacagcttgggctcaaaggtcaaggacacctttaatggcaacctgcccttcctcttcaaagtgctctcagttgaaacacccctgtccatccaggcacaccctaacaaggagctggcagagaagctgcacctccaggctccgcagcactaccccgatgccaaccacaagccagagatggccattgccctcacccccttccagggcttgtgtggcttccggccagttgaggagattgtaacctttctaaagaaggtgcctgagtttcagttcctgattggagatgaggcagcaacacacctgaagcagaccatgagccatgactcccaggctgtggcctcctctctgcagagctgtttctcccacctgatgaagagtgagaagaaggtggtggtggaacagctcaacctgttggtgaagcggatctcccagcaagcggctgccggaaacaacatggaggacatctttggggagcttttgctacagctgcaccagcagtacccaggtgatatcggctgctttgccatctacttcctgaacctgcttaccctgaagcctggggaggccatgtttctggaggccaacgtaccccatgcctacctgaaaggagactgcgtggagtgcatggcgtgttcagacaacacagttcgtgctggcctgacacccaagttcattgatgtgccaaccctgtgtgaaatgctcagctatacccctagctccagcaaggacaggctctttctcccaacacggagtcaggaagacccctacctctcaatctatgacccccctgtaccagacttcaccattatgaagacggaggtccctggctctgtcactgaatacaaggtcttggcactggactctgccagcatcctcctgatggtacaggggacagtaatagccagcacacccacaacccagacaccaatccctctgcaacgtggtggcgtgctcttcattggggccaatgagagtgtctcactgaagcttactgagccgaaggacctgctgatattccgtgcctgctgtctgctgtaaaggctgcagcctccccagctctcctctgccagccaccctaaattccagccaacctcacctcctcgggcccagctcaagcccccttccttgctctggaccccttaggtataccctggaagagctggggtgggggaggagggagcgtgaaggtagtgactcctgaacacacccaggtggaaccatctttggggaggagaggcccgtgtgaggggtctgatactccctttgtcttccctctctactcctcgctacacctgagccaggctcttgccaactctgttccagcctatggctttaggctagctgttaaatatgtgacccagcattagctcagcatctgtcagagcaagagaccaggtaatttctaagaacagggttctagcgatgggactgcccatttcctcagctgcagaggaggaaagggaaagggtaggcctgtagactaacgctgtttacacccttgttctgtcaaagcaattaaagatcacttgtgt

SEQ ID NO: 180 - DNA, 1255 bp, Homo sapiens
gtgttggttcagaggagggaccaggcagaaggtggttgagaggcagagctgcccctgagtgagccatgcagaggatctcctccctcatccatctctctctcttctgggcaggagtcatgtcagccattgagttggtgcctgaacaccaaacagtgcctgtgtcaataggggtccctgccaccctcaggtgctccatgaaaggagaagcgatcggtaactactatatcaactggtacaggaagacccaagatatccagaaccctgaccctgccgtgtaccagctgagagactctaaatccagtgacaagtctgtctgcctattcaccgattttgattctcaaacaaatgtgtcacaaagtaaggattctgatgtgtatatcacagacaaaactgtgctagacatgaggtctatggacttcaagagcaacagtgctgtggcctggagcaacaaatctgactttgcatgtgcaaacgccttcaacaacagcattattccagaagacaccttcttccccagcccagaaagttcctgtgatgtcaagctggtcgagaaaagctttgaaacagatacgaacctaaactttcaaaacctgtcagtgattgggttccgaatcctcctcctgaaagtggccgggtttaatctgctcatgacgctgcggctgtggtccagctgagatctgcaagattgtaagacagcctgtgctccctcgctccttcctctgcattgcccctcttctccctctccaaacagagggaactctcccacccccaaggaggtgaaagctgctaccacctctgtgcccccccggcaatgccaccaactggatcctacccgaatttatgattaagattgctgaagagctgccaaacactgctgccaccccctctgttcccttattgctgcttgtcactgcctgacattcacggcagaggcaaggctgctgcagcctcccctggctgtgcacattccctcctgctccccagagactgcctccgccatcccacagatgatggatcttcagtgggttctcttgggctctaggtcctgcagaatgttgtgaggggtttatttttttttaatagtgttcataaagaaatacatagtattcttcttctcaagacgtggggggaaattatctcattatcgaggccctgctatgctgtgtatctgggcgtgttgtatgtcctgctgccgatgccttcattaaaatgatttggaagagcagtaaaaaaaaaaaaaaaaaaaaaaaaaaaa

SEQ ID NO: 181 - DNA, 2334 bp, Homo sapiens
agacacctctgccctcaccatgagcctctggcagcccctggtcctggtgctcctggtgctgggctgctgctttgctgcccccagacagcgccagtccacccttgtgctcttccctggagacctgagaaccaatctcaccgacaggcagctggcagaggaatacctgtaccgctatggttacactcgggtggcagagatgcgtggagagtcgaaatctctggggcctgcgctgctgcttctccagaagcaactgtccctgcccgagaccggtgagctggatagcgccacgctgaaggccatgcgaaccccacggtgcggggtcccagacctgggcagattccaaacctttgagggcgacctcaagtggcaccaccacaacatcacctattggatccaaaactactcggaagacttgccgcgggcggtgattgacgacgcctttgcccgcgccttcgcactgtggagcgcggtgacgccgctcaccttcactcgcgtgtacagccgggacgcagacatcgtcatccagtttggtgtcgcggagcacggagacgggtatcccttcgacgggaaggacgggctcctggcacacgcctttcctcctggccccggcattcagggagacgcccatttcgacgatgacgagttgtggtccctgggcaagggcgtcgtggttccaactcggtttggaaacgcagatggcgcggcctgccacttccccttcatcttcgagggccgctcctactctgcctgcaccaccgacggtcgctccgacggcttgccctggtgcagtaccacggccaactacgacaccgacgaccggtttggcttctgccccagcgagagactctacacccgggacggcaatgctgatgggaaaccctgccagtttccattcatcttccaaggccaatcctactccgcctgcaccacggacggtcgctccgacggctaccgctggtgcgccaccaccgccaactacgaccgggacaagctcttcggcttctgcccgacccgagctgactcgacggtgatggggggcaactcggcgggggagctgtgcgtcttccccttcactttcctgggtaaggagtactcgacctgtaccagcgagggccgcggagatgggcgcctctggtgcgctaccacctcgaactttgacagcgacaagaagtggggcttctgcccggaccaaggatacagtttgttcctcgtggcggcgcatgagttcggccacgcgctgggcttagatcattcctcagtgccggaggcgctcatgtaccctatgtaccgcttcactgaggggccccccttgcataaggacgacgtgaatggcatccggcacctctatggtcctcgccctgaacctgagccacggcctccaaccaccaccacaccgcagcccacggctcccccgacggtctgccccaccggaccccccactgtccacccctcagagcgccccacagctggccccacaggtcccccctcagctggccccacaggtccccccactgctggcccttctacggccactactgtgcctttgagtccggtggacgatgcctgcaacgtgaacatcttcgacgccatcgcggagattgggaaccagctgtatttgttcaaggatgggaagtactggcgattctctgagggcagggggagccggccgcagggccccttccttatcgccgacaagtggcccgcgctgccccgcaagctggactcggtctttgaggagccgctctccaagaagcttttcttcttctctgggcgccaggtgtgggtgtacacaggcgcgtcggtgctgggcccgaggcgtctggacaagctgggcctgggagccgacgtggcccaggtgaccggggccctccggagtggcagggggaagatgctgctgttcagcgggcggcgcctctggaggttcgacgtgaaggcgcagatggtggatccccggagcgccagcgaggtggaccggatgttccccggggtgcctttggacacgcacgacgtcttccagtaccgagagaaagcctatttctgccaggaccgcttctactggcgcgtgagttcccggagtgagttgaaccaggtggaccaagtgggctacgtgacctatgacatcctgcagtgccctgaggactagggctcccgtcctgctttgcagtgccatgtaaatccccactgggaccaaccctggggaaggagccagtttgccggatacaaactggtattctgttctggaggaaagggaggagtggaggtgggctgggccctctcttctcacctttgttttttgttggagtgtttctaataaacttggattctctaaccttt

SEQ ID NO: 182 - DNA, 1911 bp, Homo sapiens
cggcggtgctgcgaggtcggcgcgcagctccgccgcgggtcgctcgggcgctgtccaggcggagccggccccgcccgggctgcagccatgatcaagcgtttcctggaggacaccacggatgatggagaactgagcaagttcgtgaaggatttctcaggaaatgcgagctgccacccaccagaggctaagacctgggcatccaggccccaagtcccggagccaaggccccaggccccggacctctatgatgatgacctggagttcagacccccctcgcggccccagtcctctgacaaccagcagtacttctgtgccccagcccctctcagcccatctgccaggccccgcagcccatggggcaagcttgatccctatgattcctctgaggatgacaaggagtatgtgggctttgcaaccctccccaaccaagtccaccgaaagtccgtgaagaaaggctttgactttaccctcatggtggcaggagagtctggcctgggcaaatccacacttgtcaatagcctcttcctcactgatctgtaccgggaccggaaacttcttggtgctgaagagaggatcatgcaaactgtggagatcactaagcatgcagtggacatagaagagaagggtgtgaggctgcggctcaccattgtggacacaccaggttttggggatgcagtcaacaacacagagtgctggaagcctgtggcagaatacattgatcagcagtttgagcagtatttccgagacgagagtggcctgaaccgaaagaacatccaagacaacagggtgcactgctgcctgtacttcatctcacccttcggccatgggtatggtccaagcctgaggctcctggcaccaccgggtgctgtcaagggaacaggccaagagcaccaggggcagggctgccactagcaggtggtcacaggttcctgttccccaggctccggccattggatgttgaattcatgaaggccctgcatcagcgggtcaacatcgtgcctatcctggctaaggcagacacactgacacctcccgaagtggaccacaagaaacgcaaaatccgggaggagattgagcattttggaatcaagatctatcaattcccagactgtgactctgatgaggatgaggacttcaaattgcaggaccaagccctaaaggaaagcatcccatttgcagtaattggcagcaacactgtagtagaggccagagggcggcgagttcggggtcgactctacccctggggcatcgtggaagtggaaaacccagggcactgcgactttgtgaagctgaggacaatgctggtacgtacccacatgcaggacctgaaggatgtgacacgggagacacattatgagaactaccgggcacagtgcatccagagcatgacccgcctggtggtgaaggaacggaatcgcaagtatgaccagaagccaggacaaagctggcagggggagatcccaagcctagccttgggtgagaccaagccctacttttgttcttctataggccctgggctcaatctaagcgggtgctggggtcctcctcgccttatcaacccttttctccctttagcaaactgactcgggaaagtggtaccgacttccccatccctgctgtcccaccagggacagatccagaaactgagaagcttatccgagagaaagatgaggagctgcggcggatgcaggagatgctacacaaaatacaaaaacagatgaaggagaactattaactggctttcagccctggatatttaaatctcctcctcttcttcctgtccatgccggcccctcccagcaccagctctgctcaggccccttcagctactgccacttcgccttacatccctgctgactgcccagagactcagaggaaataaagtttaataaatctgtaggtggctaaaaa

SEQ ID NO: 183 - DNA, 1731 bp, Homo sapiens
tttatgaagagctcgactctgactccgaggacctagaccccaatcctgaagatctggacccggtttctgaagacccagagcctgatcctgaagacctcaacactgtcccggaagacgtggaccccagctatgaagatctggagcccgtctcggaggatctggaccccgacgccgaagctccgggctcggaaccccaagatcccgaccccatgtcttcgagtttcgacctcgatccagatgtgattggccccgtacccctgattctcgatcctaacagcgacaccctcagccccggcgatccaaaagtggaccccatctcctctggcctcactgccaccccccaggtcttggccaccagccccgcggtgctccccgcccccgccagcccgccccggcccttctcctgcccggattgcgggcgagccttccgccgcagctccgggctgagccagcatcgccgcacgcacagcggcgagaagccgtaccgctgccccgactgcgggaagtccttcagccacggtgccaccctggctcagcaccgtggcatccacactggggcgcggccgtaccagtgcgcggcctgcggcaaggccttcggctggcgctccacgctgctgaaacatcgcagcagccacagcggggagaagccgcaccactgcccggtgtgtggcaaggccttcgggcacggctcgctcctggcacagcacctgcgcacgcacggcggcccgcggccccacaagtgcccggtgtgcgccaagggcttcggccagggctctgcgctgctcaaacacctgcgcacgcacacgggcgagcggccctacccgtgtccgcagtgcggcaaggccttcgggcagagctcggcgctgctgcagcaccagcgcacacacacggccgagcgcccctaccgctgcccccactgcggcaaagccttcgggcagagctccaacttgcaacaccacctgcgcatccacacgggcgagcggccctacgcctgcccgcactgctccaaggccttcggccagagctcagcgctgctccagcacctgcacgtgcattcgggcgagcgtccctatcgctgtcagctctgcgggaaggccttcggccaggcctccagcctcaccaagcacaaacgggtgcatgagggtgcagccgctgctgcagctgccgcggccgctgcagctgcagcagcggccgccggcctgggcctcgggcctggcctaagccctgcatccatgatgaggccggggcaggtctccctcctgggtcctgatgctgtttctgtgctcggctctggcttgggcctcagccctggcaccagctctggccgcaaccctgaccctggctctgggccgggcactctgccggatcccagctccaaacccctccccggctccagatccacccccagccctactcctgtggaatcttctgacccaaaggctgggcacgacgctggtcctgaccttgtgcccagcccagaccttgatcctgtgcccagcccagaccctgatcctgtgcccagccctgatcccaaccctgtgtcctgccctgacccctgttctcccactcgtggcactgtcagcccagccctccctaccggcgagagtccagagtgggtacaggagcaaggggcactgctggggcctgatggctgaaggagacgccggcatcctcgggggcctggggaagttgtgtgttgtgcagtcagtaaaatcctcccactgcctccgg

SEQ ID NO: 184 - DNA, 4343 bp, Homo sapiens
agatttgataatgggctgcattaaaagtaaagaaaacaaaagtccagccattaaatacagacctgaaaatactccagagcctgtcagtacaagtgtgagccattatggagcagaacccactacagtgtcaccatgtccgtcatcttcagcaaagggaacagcagttaatttcagcagtctttccatgacaccatttggaggatcctcaggggtaacgccttttggaggtgcatcttcctcattttcagtggtgccaagttcatatcctgctggtttaacaggtggtgttactatatttgtggccttatatgattatgaagctagaactacagaagacctttcatttaagaagggtgaaagatttcaaataattaacaatacggaaggagattggtgggaagcaagatcaatcgctacaggaaagaatggttatatcccgagcaattatgtagcgcctgcagattccattcaggcagaagaatggtattttggcaaaatggggagaaaagatgctgaaagattacttttgaatcctggaaatcaacgaggtattttcttagtaagagagagtgaaacaactaaaggtgcttattccctttctattcgtgattgggatgagataaggggtgacaatgtgaaacactacaaaattaggaaacttgacaatggtggatactatatcacaaccagagcacaatttgatactctgcagaaattggtgaaacactacacagaacatgctgatggtttatgccacaagttgacaactgtgtgtccaactgtgaaacctcagactcaaggtctagcaaaagatgcttgggaaatccctcgagaatctttgcgactagaggttaaactaggacaaggatgtttcggcgaagtgtggatgggaacatggaatggaaccacgaaagtagcaatcaaaacactaaaaccaggtacaatgatgccagaagctttccttcaagaagctcagataatgaaaaaattaagacatgataaacttgttccactatatgctgttgtttctgaagaaccaatttacattgtcactgaatttatgtcaaaaggaagcttattagatttccttaaggaaggagatggaaagtatttgaagcttccacagctggttgatatggctgctcagattgctgatggtatggcatatattgaaagaatgaactatattcaccgagatcttcgggctgctaatattcttgtaggagaaaatcttgtgtgcaaaatagcagactttggtttagcaaggttaattgaagacaatgaatacacagcaagacaaggtgcaaaatttccaatcaaatggacagctcctgaagctgcactgtatggtcggtttacaataaagtctgatgtctggtcatttggaattctgcaaacagaactagtaacaaagggccgagtgccatatccaggtatggtgaaccgtgaagtactagaacaagtggagcgaggatacaggatgccgtgccctcagggctgtccagaatccctccatgaattgatgaatctgtgttggaagaaggaccctgatgaaagaccaacatttgaatatattcagtccttcttggaagactacttcactgctacagagccacagtaccagccaggagaaaatttataattcaagtagcctattttatatgcacaaatctgccaaaatataaagaacttgtgtagattttctacaggaatcaaaagaagaaaatcttctttactctgcatgtttttaatggtaaactggaatcccagatatggttgcacaaaaccacttttttttccccaagtattaaactctaatgtaccaatgatgaatttatcagcgtatttcagggtccaaacaaaatagagctaagatactgatgacagtgtgggtgacagcatggtaatgaaggacagtgaggctcctgcttatttataaatcatttcctttctttttttccccaaagtcagaattgctcaaagaaaattatttattgttacagataaaacttgagagataaaaagctataccataataaaatctaaaattaaggaatatcatgggaccaaataattccattccagttttttaaagtttcttgcatttattattctcaaaagttttttctaagttaaacagtcagtatgcaatcttaatatatgctttcttttgcatggacatgggccaggtttttcaaaaggaatataaacaggatctcaaacttgattaaatgttagaccacagaagtggaatttgaaagtataatgcagtacattaatattcatgttcatggaactgaaagaataagaactttttcacttcagtccttttctgaagagtttgacttagaataatgaaggtaactagaaagtgagttaatcttgtatgaggttgcattgattttttaaggcaatatataattgaaactactgtccaatcaaaggggaaatgttttgatctttagatagcatgcaaagtaagacccagcattttaaaagccctttttaaaaactagacttcgtactgtgagtattgcttatatgtccttatggggatgggtgccacaaatagaaaatatgaccagatcagggacttgaatgcacttttgctcatggtgaatatagatgaacagagaggaaaatgtatttaaaagaaatacgagaaaagaaaatgtgaaagttttacaagttagagggatggaaggtaatgtttaatgttgatgtcatggagtgacagaatggctttgctggcactcagagctcctcacttagctatattctgagactttgaagagttataaagtataactataaaactaatttttcttacacactaaatgggtatttgttcaaaataatgaagttatggcttcacattcattgcagtgggatatggtttttatgtaaaacatttttagaactccagttttcaaatcatgtttgaatctacattcacttttttttgttttcttttttgagacggagtctcgctctgccgcccaggctggagtgcagtggcgcgatctcggctcactgcaagctctgcctcccaggttcacaccattctcctgcctcagcctcccgagtagctgggactacaggtgcccaccaccacgcctggctagttttttgtatttttagtagagacgcagtttcaccgtgttagccaggatggtctcgatctcctgaccttgtgatctgcccgcctcggcctcccaaagtgctgggattacaggcgtgagccaccgcgcccagcctacattcacttctaaagtctatgtaatggtggtcattttttcccttttagaatacattaaatggttgatttggggaggaaaacttattctgaatattaacggtggtgaaaaggggacagtttttaccctaaagtgcaaaagtgaaacatacaaaataagactaatttttaagagtaactcagtaatttcaaaatacagatttgaatagcagcattagtggtttgagtgtctagcaaaggaaaaattgatgaataaaatgaaggtctggtgtatatgttttaaaatactctcatatagtcacactttaaattaagccttatattaggcccctctattttcaggatataattcttaactatcattatttacctgattttaatcatcagattcgaaattctgtgccatggcgtatatgttcaaattcaaaccatttttaaaatgtgaagatggacttcatgcaagttggcagtggttctggtactaaaaattgtggttgttttttctgtttacgtaacctgcttagtattgacactctctaccaagagggtcttcctaagaagagtgctgtcattatttcctcttatcaacaacttgtgacatgagattttttaagggctttatgtgaactatgatattgtaatttttctaagcatattcaaaagggtgacaaaattacgtttatgtactaaatctaatcaggaaagtaaggcaggaaaagttgatggtattcattaggttttaactgaatggagcagttccttatataataacaattgtatagtagggataaaacactaacttaatgtgtattcattttaaattgttctgtatttttaaattgccaagaaaaacaactttgtaaatttggagatattttccaacagcttttcgtcttcagtgtcttaatgtggaagttaacccttaccaaaaaaggaagttggcaaaaacagccttctagcacacttttttaaatgaataatggtagcctaaacttaatatttttataaagtattgtaatattgttttgtggataattgaaataaaaagttctcattgaatgcacctattaaaaaaaaaaaaaaaaaa

SEQ ID NO: 185 - DNA, 901 bp, Homo sapiens
ggccacatggactggggtgcaatgggacagctgctgccagcgagagggaccagggcaccactctctagggagcccacactgcaagtcaggccacaaggacctctgaccctgagggccgatgaggccagggacaggccaggggggccttgaggcccctggtgagccaggccccaacctcaggcagcgctggcccctgctgctgctgggtctggccgtggtaacccatggcctgctgcgcccaacagctgcatcgcagagcagggccctgggccctggagcccctggaggaagcagccggtccagcctgaggagccggtggggcaggttcctgctccagcgcggctcctggactggccccaggtgctggccccgggggtttcaatccaagcataactcagtgacgcatgtgtttggcagcgggacccagctcaccgttttaagtcagcccaaggccaccccctcggtcactctgttcccgccgtcctctgaggagctccaagccaacaaggctacactggtgtgtctcatgaatgacttttatccgggaatcttgacggtgacctggaaggcagatggtacccccatcacccagggcgtggagatgaccacgccctccaaacagagcaacaacaagtacgcggccagcagctacctgagcctgacgcccgagcagtggaggtcccgcagaagctacagctgccaggtcatgcacgaagggagcaccgtggagaagacggtggcccctgcagaatgttcataggttcccagccccgaccccacccaaaggggcctggagctgcaggatcccaggggaagggtctctctctgcatcccaagccatccagcccttctccctgtacccagtaaaccctaaataaataccctctttgtcaaccagaaa

SEQ ID NO: 186 - DNA, 4054 bp, Homo sapiens
cgccccggcgcggggccctgcggtagcctcaggcccctcccctggacccgccgcagagccagtgcagaatacagaaactgcagccatgaccacgcacgtcaccctggaagatgccctgtccaacgtggacctgcttgaagagcttcccctccccgaccagcagccatgcatcgagcctccaccttcctccatcatgtaccaggctaactttgacacaaactttgaggacaggaatgcatttgtcacgggcattgcaaggtacattgagcaggctacagtccactccagcatgaatgagatgctggaggaaggacatgagtatgcggtcatgctgtacacctggcgcagctgttcccgggccattccccaggtgaaatgcaacgagcagcccaaccgagtagagatctatgagaagacagtagaggtgctggagccggaggtcaccaagctcatgaagttcatgtattttcagcgcaaggccatcgagcggttctgcagcgaggtgaagcggctgtgccatgccgagcgcaggaaggactttgtctctgaggcctacctcctgacccttggcaagttcatcaacatgtttgctgtcctggatgagctaaagaacatgaagtgcagcgtcaagaatgaccactctgcctacaagagggcagcacagttcctgcggaagatggcagatccccagtctatccaggagtcgcagaacctttccatgttcctggccaaccacaacaggatcacccagtgtctccaccagcaacttgaagtgatcccaggctatgaggagctgctggctgacattgtcaacatctgtgtggattactacgagaacaagatgtacctgactcccagtgagaaacatatgctcctcaaggtgatgggctttggcctctacctaatggatggaaatgtcagtaacatttacaaactggatgccaagaagagaattaatcttagcaaaattgataaattctttaagcagctgcaggtggtgccccttttcggcgacatgcagatagagctggccagatacattgagaccagtgctcactatgaagagaacaagtccaagtggacgtgcacccagagcagcatcagcccccagtacaatatctgcgagcagatggttcagatccgggatgaccacatccgcttcatctccgagctcgctcgctacagcaacagtgaggtggtgacgggctcagggctggacagccagaagtcagacgaggagtatcgcgagctcttcgacctagccctgcggggtctgcagcttctatccaagtggagcgcccacgtcatggaggtgtactcttggaagctggttcatcccacagacaagttctgcaacaaggactgtcctggcaccgcggaggaatatgagagagccacacgctacaattacaccagtgaggaaaaatttgccttcgttgaggtgatcgccatgatcaaaggcctgcaggtgctcatgggcaggatggagagcgtcttcaaccaggccatcaggaacaccatctacgcggcattgcaggacttcgcccaggtgacgctgcgtgagcccctgcggcaggcggtacggaagaagaagaatgtcctcatcagcgtcctacaggcaattcgaaagaccatctgtgactgggagggagggcgagagccccctaatgacccatgcttgagaggggagaaggaccccaaaggtggatttgatatcaaggtgccccggcgtgctgtggggccatccagcacacagctgtacatggtgcggaccatgcttgaatcactcattgcagacaaaagcggctccaagaagaccctgaggagcagcctggatggacccattgtcctcgccatagaggactttcacaaacagtccttcttcttcacacatctgctcaacatcagtgaagccctgcagcagtgttgtgacctctcccagctctggttccgagaattcttcctggagttaaccatgggccgacgaatccagttccccatcgagatgtccatgccctggattctaacggaccatatcctggaaaccaaagaaccttccatgatggagtatgtcctctaccctctggatctgtacaacgacagcgcctactatgctctgaccaagtttaaaaagcagttcctgtacgatgagatagaagctgaggtgaacctgtgttttgatcagtttgtctacaagctggcagaccagatctttgcttactacaaagccatggctggcagtgtcctgttggataaacgttttcgagctgagtgtaagaattatggcgtcatcattccgtatccaccgtccaatcgctatgaaacactgctgaagcagagacacgtccagctgttgggtagatcaattgacttgaacagactcattacccagcgcatctctgccgccatgtataaatccttggaccaagctatcagccgctttgagagtgaggacctgacctccattgtggagctggagtggctgctggagattaaccggctcacgcatcggctgctctgtaagcatatgacgctggacagcttcgatgccatgttccgagaggccaatcacaatgtgtccgccccctatggccgtatcaccctgcatgtcttctgggaactgaactttgactttctccccaactactgctacaatgggtccactaaccgttttgtgcggactgccattcctttcacccaagaaccacaacgagacaaacctgccaacgtccagccttattacctctatggatccaagcctctcaacattgcctacagccacatctacagctcctacaggaatttcgtggggccacctcatttcaagactatctgcagactcctgggttatcagggcatcgctgtggtcatggaggaactgctaaagattgtgaagagcttgctccaaggaaccattctccagtatgtgaaaacactgatagaggtgatgcccaagatatgccgcttgccccgacatgagtatggctccccagggatcctggagttcttccaccaccagctgaaggacatcattgagtacgcagagctcaaaacagacgtgttccagagcctgagggaagtgggcaatgccatcctcttctgcctcctcatagagcaagctctgtctcaggaggaggtctgcgatttgctccatgccgcacccttccaaaacatcttgcctagagtctacatcaaagagggggagcgcctggaggtccggatgaaacgtctggaagccaagtatgccccgctccacctggtccctctgatcgagcggctggggacccctcagcaaatcgccattgctcgcgagggtgacctcctgaccaaggagcggctgtgctgtggcctgtccatgttcgaggtcatcctgacccgcattcggagctacctgcaggaccccatctggcggggcccaccgcccaccaatggcgtcatgcacgtcgatgagtgtgtggagttccaccggctgtggagcgccatgcagttcgtgtactgcatccctgtgggaaccaacgagttcacagctgagcagtgtttcggcgatggcttgaactgggttggttgctccatcattgtcctgctgggccagcagcgtcgctttgacctgttcgacttctgttaccacctgctaaaagtgcagaggcaggacgggaaggatgaaatcattaagaatgtgcccctgaagaagatggccgaccggatcaggaagtatcagatcttgaacaatgaggtttttgccatcctgaacaaatacatgaagtccgtggagacagacagttccactgtggagcatgtgcgctgcttccagccacccatccaccagtccttggccaccacttgctaagcagaagatcctgcagacccttatctggaggaggaagagaagcaggagagagaaagccacagccagcctgccataggatccaactggacaacgtgtgggatggacctggaaacaagcacctccccaaacacatcaccactccctagggcggggcctgtgcatgctctcccatgacatctccatgctggtttctccatagcataaatg

SEQ ID NO: 187 - DNA, 2479 bp, Homo sapiens
  misc_feature (1146)..(1146): N may be C, G, T or A
ggcacgagggggcggcggctgcgggcgcagagcggagatgcagcggcttggggccaccctgctgtgcctgctgctggcggcggcggtccccacggcccccgcgcccgctccgacggcgacctcggctccagtcaagcccggcccggctctcagctacccgcaggaggaggccaccctcaatgagatgttccgcgaggttgaggaactgatggaggacacgcagcacaaattgcgcagcgcggtggaagagatggaggcagaagaagctgctgctaaagcatcatcagaagtgaacctggcaaacttacctcccagctatcacaatgagaccaacacagacacgaaggttggaaataataccatccatgtgcaccgagaaattcacaagataaccaacaaccagactggacaaatggtcttttcagagacagttatcacatctgtgggagacgaagaaggcagaaggagccacgagtgcatcatcgacgaggactgtgggcccagcatgtactgccagtttgccagcttccagtacacctgccagccatgccggggccagaggatgctctgcacccgggacagtgagtgctgtggagaccagctgtgtgtctggggtcactgcaccaaaatggccaccaggggcagcaatgggaccatctgtgacaaccagagggactgccagccggggctgtgctgtgccttccagagaggcctgctgttccctgtgtgcacacccctgcccgtggagggcgagctttgccatgaccccgccagccggcttctggacctcatcacctgggagctagagcctgatggagccttggaccgatgcccttgtgccagtggcctcctctgccagccccacagccacagcctggtgtatgtgtgcaagccgaccttcgtggggagccgtgaccaagatggggagatcctgctgcccagagaggtccccgatgagtatgaagttggcagcttcatggaggaggtgcgccaggagctggaggacctggagaggagcctgactgaagagatggcgctgggggagcctgcggctgccgccgctgcactgctgggaggggaagagatttagatctggaccaggctgtgggtagatgtgcaatagaaatagctaatttatttccccangtgtgtgctttaagcgtgggctgaccaggcttcttcctacatcttcttcccagtaagtttcccctctggcttgacagcatgaggtgttgtgcatttgttcagctcccccaggctgttctccaggcttcacagtctggtgcttgggagagtcaggcagggttaaactgcaggagcagtttgccacccctgtccagattattggctgctttgcctctaccagttggcagacagccgtttgttctacatggctttgataattgtttgaggggaggagatggaaacaatgtggagtctccctctgattggttttggggaaatgtggagaagagtgccctgctttgcaaacatcaacctggcaaaaatgcaacaaatgaattttccacgcagttctttccatgggcataggtaagctgtgccttcagctgttgcagatgaaatgttctgttcaccctgcattacatgtgtttattcatccagcagtgttgctcagctcctacctctgtgccagggcagcattttcatatccaagatcaattccctctctcagcacagcctggggagggggtcattgttctcctcgtccatcagggatttcagaggctcagagactgcaagctgcttgcccaagtcacacagctagtgaagaccagagcagtttcatctggttgtgactctaagctcagtgctctctccactaccccacaccagccttggtgccaccaaaagtgctccccaaaaggaaggagaatgggatttttcttttgaggcatgcacatctggaattaaggtcaaactaattctcacatccctctaaaagtaaactactgttaggaacagcagtgttctcacagtgtggggcagccgtccttctaatgaagacaatgatattgacactgtccctctttggcagttgcattagtaactttgaaaggtatatgactgagcgtagcatacaggttaacctgcagaaacagtacttaggtaattgtagggcgaggattataaatgaaatttgcaaaatcacttagcagcaactgaagacaattatcaaccacgtggagaaaatcaaaccgagcagggctgtgtgaaacatggttgtaatatgcgactgcgaacactgaactctacgccactccacaaatgatgttttcaggtgtcatggactgttgccaccatgtattcatccagagttcttaaagtttaaagttgcacatgattgtataagcatgctttctttgagttttaaattatgtataaacataagttgcatttagaaatcaagcataaatcacttcaactgctaaaaaaaaaaaaaaaaaaaaaaaaaaaaaaa

SEQ ID NO: 188 - DNA, 2629 bp, Homo sapiens
acttgtcatggcgactgtccagctttgtgccaggagcctcgcaggggttgatgggattggggttttcccctcccatgtgctcaagactggcgctaaaagttttgagcttctcaaaagtctagagccaccgtccagggagcaggtagctgctgggctccggggacactttgcgttcgggctgggagcgtgctttccacgacggtgacacgcttccctggattggcagccagactgccttccgggtcactgccatggaggagccgcagtcagatcctagcgtcgagccccctctgagtcaggaaacattttcagacctatggaaactacttcctgaaaacaacgttctgtcccccttgccgtcccaagcaatggatgatttgatgctgtccccggacgatattgaacaatggttcactgaagacccaggtccagatgaagctcccagaatgccagaggctgctccccgcgtggcccctgcaccagcagctcctacaccggcggcccctgcaccagccccctcctggcccctgtcatcttctgtcccttcccagaaaacctaccagggcagctacggtttccgtctgggcttcttgcattctgggacagccaagtctgtgacttgcacgtactcccctgccctcaacaagatgttttgccaactggccaagacctgccctgtgcagctgtgggttgattccacacccccgcccggcacccgcgtccgcgccatggccatctacaagcagtcacagcacatgacggaggttgtgaggcgctgcccccaccatgagcgctgctcagatagcgatggtctggcccctcctcagcatcttatccgagtggaaggaaatttgcgtgtggagtatttggatgacagaaacacttttcgacatagtgtggtggtgccctatgagccgcctgaggttggctctgactgtaccaccatccactacaactacatgtgtaacagttcctgcatgggcggcatgaaccggaggcccatcctcaccatcatcacactggaagactccagtggtaatctactgggacggaacagctttgaggtgcgtgtttgtgcctgtcctgggagagaccggcgcacagaggaagagaatctccgcaagaaaggggagcctcaccacgagctgcccccagggagcactaagcgagcactgcccaacaacaccagctcctctccccagccaaagaagaaaccactggatggagaatatttcacccttcagatccgtgggcgtgagcgcttcgagatgttccgagagctgaatgaggccttggaactcaaggatgcccaggctgggaaggagccaggggggagcagggctcactccagccacctgaagtccaaaaagggtcagtctacctcccgccataaaaaactcatgttcaagacagaagggcctgactcagactgacattctccacttcttgttccccactgacagcctcccacccccatctctccctcccctgccattttgggttttgggtctttgaacccttgcttgcaataggtgtgcgtcagaagcacccaggacttccatttgctttgtcccggggctccactgaacaagttggcctgcactggtgttttgttgtggggaggaggatggggagtaggacataccagcttagattttaaggtttttactgtgagggatgtttgggagatgtaagaaatgttcttgcagttaagggttagtttacaatcagccacattctaggtaggtaggggcccacttcaccgtactaaccagggaagctgtccctcatgttgaattttctctaacttcaaggcccatatctgtgaaatgctggcatttgcacctacctcacagagtgcattgtgagggttaatgaaataatgtacatctggccttgaaaccaccttttattacatggggtctaaaacttgacccccttgagggtgcctgttccctctccctctccctgttggctggtgggttggtagtttctacagttgggcagctggttaggtagagggagttgtcaagtcttgctggcccagccaaaccctgtctgacaacctcttggtcgaccttagtacctaaaaggaaatctcaccccatcccacaccctggaggatttcatctcttgtatatgatgatctggatccaccaagacttgttttatgctcagggtcaatttcttttttcttttttttttttttttttctttttctttgagactgggtctcgctttgttgcccaggctggagtggagtggcgtgatcttggcttactgcagcctttgcctccccggctcgagcagtcctgcctcagcctccggagtagctgggaccacaggttcatgccaccatggccagccaacttttgcatgttttgtagagatggggtctcacagtgttgcccaggctggtctcaaactcctgggctcaggcgatccacctgtctcagcctcccagagtgctgggattacaattgtgagccaccacgtggagctggaagggtcaacatcttttacattctgcaagcacatctgcattttcaccccacccttcccctccttctccctttttatatcccatttttatatcgatctcttattttacaataaaactttgctgcca

SEQ ID NO: 189 - DNA, 1246 bp, Homo sapiens
gaccagcctacagccgcctgcatctgtatccagcgccaggtcccgccagtcccagctgcgcgcgccccccagtcccgcacccgttcggcccaggctaagttagccctcaccatgccggtcaaaggaggcaccaagtgcatcaaatacctgctgttcggatttaacttcatcttctggcttgccgggattgctgtccttgccattggactatggctccgattcgactctcagaccaagagcatcttcgagcaagaaactaataataataattccagcttctacacaggagtctatattctgatcggagccggcgccctcatgatgctggtgggcttcctgggctgctgcggggctgtgcaggagtcccagtgcatgctgggactgttcttcggcttcctcttggtgatattcgccattgaaatagctgcggccatctggggatattcccacaaggatgaggtgattaaggaagtccaggagttttacaaggacacctacaacaagctgaaaaccaaggatgagccccagcgggaaacgctgaaagccatccactatgcgttgaactgctgtggtttggctgggggcgtggaacagtttatctcagacatctgccccaagaaggacgtactcgaaaccttcaccgtgaagtcctgtcctgatgccatcaaagaggtcttcgacaataaattccacatcatcggcgcagtgggcatcggcattgccgtggtcatgatatttggcatgatcttcagtatgatcttgtgctgtgctatccgcaggaaccgcgagatggtctagagtcagcttacatccctgagcaggaaagtttacccatgaagattggtgggattttttgtttgtttgttttgttttgtttgttgtttgttgtttgtttttttgccactaattttagtattcattctgcattgctagataaaagctgaagttactttatgtttgtcttttaatgcttcattcaatattgacatttgtagttgagcggggggtttggtttgctttggtttatattttttcagttgtttgtttttgcttgttatattaagcagaaatcctgcaatgaaaggtactatatttgctagactctagacaagatattgtacataaaagaatttttttgtctttaaatagatacaaatgtctatcaactttaatcaagttgtaacttatattgaagacaatttgatacataataaaaaattatgacaatgtcaaaaaaaaaaaaaaa

SEQ ID NO: 190 - DNA, 1735 bp, Homo sapiens
gacagaggcgcggaggctcggagagagaagacgtggagggagggacagagcctggacagcggtggacacggcatcgtgcgcggggaagagggcagcacgcagcaggcgccgagcgccgggcaccgggaagggcagcccgggtgatctccggccgtccatgcacagagcgccttcccccacagccgagcagccgccgggcggaggggacagcgcccgccggaccctgcagcccagactcaagcccagtgcccgagccatggcactgcctcggacgctgggggagctgcagctgtaccgggtcctgcagcgcgccaacctcctttcctactatgagaccttcatccagcagggaggggacgacgtgcagcagctgtgtgaggcgggtgaggaggagtttctggagatcatggcacttgtgggcatggccaccaagcccctccatgtccggcgcctgcagaaggcactgagagagtgggccaccaatccagggctcttcagtcaaccagtgcctgctgttcccgtctccagcatcccgctcttcaagatctctgagactgcgggtacccggaaagggagcatgagcaatgggcatggcagcccaggggaaaaggcaggcagtgcccgcagttttagccccaagagcccccttgaacttggagagaagctatcaccactgcctgggggacctggggcaggggacccccggatctggccaggccggagcactccagagtcggacgttggggcaggaggagaagaggaggctggctcgccccccttctccccccctgcagggggaggagtccctgaggggactggggctggggggctggcagcaggtgggactgggggtggtccagaccgactggagccagagatggtacgcatggtggtggaaagtgtggagaggatcttccggagcttcccaaggggggatgctggggaggtcacatccctgctaaagctgaataagaagctggcacggagcgttgggcacatctttgagatggatgataatgacagccagaaggaagaggagatccgcaaatacagcatcatctatggccgtttcgactctaagcggcgggagggcaagcagctcagcctgcacgagctcaccatcaacgaggctgctgcccagttctgcatgagggacaacacgctcttattacggagagtggagctcttctctttgtcccgccaagtagcccgagagagcacctacttgtcctccttgaagggctccaggcttcaccctgaagaactgggaggccctccactgaagaagctgaaacaagaggttggagaacagagtcaccctgaaatccagcagcctcccccaggccctgagtcctatgtacccccataccgccccagcctggaggaggacagcgccagcctgtctggggagagtctggatggacatttgcaggctgtggggtcatgtccaaggctgacgccgccccctgctgacctgcctctggcattgccagcccatgggctatggagccgacacatcctgcagcagacactgatggacgaggggctgcggctcgcccgcctcgtctcccacgaccgcgtgggccgcctcagcccctgtgtgcctgcgaagccacctctcgcagagttcgaggaagggctgctggacagatgtcctgccccaggaccccatcccgcgctggtggagggtcgcaggagcagcgtgaaagtggaggctgaggccagccggcagtga

SEQ ID NO: 191 - DNA, 1432 bp, Homo sapiens; identical to SEQ ID NO: 3

SEQ ID NO: 192 - DNA, 4459 bp, Homo sapiens
ctctcagtgtctccaactttgcgctggaagaaaaacttcccgcgcgccggcagaactgcagcgcctccttttagtgactccgggagcttcggctgtagccggctctgcgcgcccttccaacgaataatagaaattgttaattttaacaatccagagcaggccaacgaggctttgctctcccgacccgaactaaagctccctcgctccgtgcgctgctacgagcggtgtctcctggggctccaatgcagcgagctgtgcccgaggggttcggaaggcgcaagctgggcagcgacatggggaacgcggagcgggctccggggtctcggagctttgggcccgtacccacgctgctgctgctcgccgcggcgctactggccgtgtcggacgcactcgggcgcccctccgaggaggacgaggagctagtggtgccggagctggagcgcgccccgggacacgggaccacgcgcctccgcctgcacgcctttgaccagcagctggatctggagctgcggcccgacagcagctttttggcgcccggcttcacgctccagaacgtggggcgcaaatccgggtccgagacgccgcttccggaaaccgacctggcgcactgcttctactccggcaccgtgaatggcgatcccagctcggctgccgccctcagcctctgcgagggcgtgcgcggcgccttctacctgctgggggaggcgtatttcatccagccgctgcccgccgccagcgagcgcctcgccaccgccgccccaggggagaagccgccggcaccactacagttccacctcctgcggcggaatcggcagggcgacgtcggcggcacgtgcggggtcgtggacgacgagccccggccgactgggaaagcggagaccgaagacgaggacgaagggactgagggcgaggacgaaggggctcagtggtcgccgcaggacccggcactgcaaggcgtaggacagcccacaggaactggaagcataagaaagaagcgatttgtgtccagtcaccgctatgtggaaaccatgcttgtggcagaccagtcgatggcagaattccacggcagtggtctaaagcattaccttctcacgttgttttcggtggcagccagattgtacaaacaccccagcattcgtaattcagttagcctggtggtggtgaagatcttggtcatccacgatgaacagaaggggccggaagtgacctccaatgctgccctcactctgcggaacttttgcaactggcagaagcagcacaacccacccagtgaccgggatgcagagcactatgacacagcaattcttttcaccagacaggacttgtgtgggtcccagacatgtgatactcttgggatggctgatgttggaactgtgtgtgatccgagcagaagctgctccgtcatagaagatgatggtttacaagctgccttcaccacagcccatgaattaggccacgtgtttaacatgccacatgatgatgcaaagcagtgtgccagccttaatggtgtgaaccaggattcccacatgatggcgtcaatgctttccaacctggaccacagccagccttggtctccttgcagtgcctacatgattacatcatttctggataatggtcatggggaatgtttgatggacaagcctcagaatcccatacagctcccaggcgatctccctggcacctcgtacgatgccaaccggcagtgccagtttacatttggggaggactccaaacactgccccgatgcagccagcacatgtagcaccttgtggtgtaccggcacctctggtggggtgctggtgtgtcaaaccaaacacttcccgtgggcggatggcaccagctgtggagaagggaaatggtgtatcaacggcaagtgtgtgaacaaaaccgacagaaagcattttgatacgccttttcatggaagctggggaatgtgggggccttggggagactgttcgagaacgtgcggtggaggagtccagtacacgatgagggaatgtgacaacccagtcccaaagaatggagggaagtactgtgaaggcaaacgagtgcgctacagatcctgtaaccttgaggactgtccagacaataatggaaaaacctttagagaggaacaatgtgaagcacacaacgagttttcaaaagcttcctttgggagtgggcctgcggtggaatggattcccaagtacgctggcgtctcaccaaaggacaggtgcaagctcatctgccaagccaaaggcattggctacttcttcgttttgcagcccaaggttgtagatggtactccatgtagcccagattccacctctgtctgtgtgcaaggacagtgtgtaaaagctggttgtgatcgcatcatagactccaaaaagaagtttgataaatgtggtgtttgcgggggaaatggatctacttgtaaaaaaatatcaggatcagttactagtgcaaaacctggatatcatgatatcatcacaattccaactggagccaccaacatcgaagtgaaacagcggaaccagaggggatccaggaacaatggcagctttcttgccatcaaagctgctgatggcacatatattcttaatggtgactacactttgtccaccttagagcaagacattatgtacaaaggtgttgtcttgaggtacagcggctcctctgcggcattggaaagaattcgcagctttagccctctcaaagagcccttgaccatccaggttcttactgtgggcaatgcccttcgacctaaaattaaatacacctacttcgtaaagaagaagaaggaatctttcaatgctatccccactttttcagcatgggtcattgaagagtggggcgaatgttctaagtcatgtgaattgggttggcagagaagactggtagaatgccgagacattaatggacagcctgcttccgagtgtgcaaaggaagtgaagccagccagcaccagaccttgtgcagaccatccctgcccccagtggcagctgggggagtggtcatcatgttctaagacctgtgggaagggttacaaaaaaagaagcttgaagtgtctgtcccatgatggaggggtgttatctcatgagagctgtgatcctttaaagaaacctaaacatttcatagacttttgcacaatggcagaatgcagttaagtggtttaagtggtgttagctttgagggcaaggcaaagtgaggaagggctggtgcagggaaagcaagaaggctggagggatccagcgtatcttgccagtaaccagtgaggtgtatcagtaaggtgggattatgggggtagatagaaaaggagttgaatcatcagagtaaactgccagttgcaaatttgataggatagttagtgaggattattaacctctgagcagtgatatagcataataaagccccgggcattattattattatttcttttgttacatctattacaagtttagaaaaaacaaagcaattgtcaaaaaaagttagaactattacaacccctgtttcctggtacttatcaaataacttagtatcatgggggttgggaaatgaaaagtaggagaaaagtgagattttactaagacctgttttactttaccttcactaacaatggggggagaaaggagtacaaataggatctttgaccagcactgtttatggctgctatggtttcagagaatgtttatacattatttctaccgagaattaaaacttcagattgttcaacatgagagaaaggctcagcaacgtgaaataacgcaaatggcttcctctttccttttttggaccatctcagtctttatttgtgtaattcattttgaggaaaaaacaactccatgtatttattcaagtgcattaaagtctacaatggaaaaaaagcagtgaagcattagatgctggtaaaagctagaggagacacaatgagcttagtacctccaacttcctttctttcctaccatgtaaccctgctttgggaatatggatgtaaagaagtaacttgtgtctcatgaaaatcagtacaatcacacaaggaggatgaaacgccggaacaaaaatgaggtgtgtagaacagggtcccacaggtttggggacattgagatcacttgtcttgtggtggggaggctgctgaggggtagcaggtccatctccagcagctggtccaacagtcgtatcctggtgaatgtctgttcagctcttctgtgagaatatgattttttccatatgtatatagtaaaatatgttactataaattacatgtactttataagtattggtttgggtgttccttccaagaaggactatagttagtaataaatgcctataataacatatttatttttatacatttatttctaatgaaaaaaacttttaaattatatcgcttttgtggaagtgcatataaaatagagtatttatacaatatatgttactagaaataaaagaacacttttggaaaaaaaaaaaaaaaaaaaaa

SEQ ID NO: 193 - DNA, 1004 bp, Homo sapiens
cggacgcgtgggtggaccaaattgccccgcagcctgcgcatgagggataagagggcagactttgtggttgggtcccttgggggccacattgtggccattgggggccttggaaaccagccatgtcctttgggctctgtggagagctttagccttgcacggcggcgctgggaggcattgcctgccatgcccactgcccgctgctcctgctctagtctgcaggctgggccccggctgtttgttattgggggtgtggcccagggccccagtcaagccgtggaggcactgtgtctgcgtgatgggtctgaaggcttggtgggagctgtccactggagcagctcattgccagaggcagctatttctatggctccttttgctgctgaggacactcactgtggctctgtgggatgagagaggcatgggggtgagcacttgaaacactgccttggggccttgggttaggggagcctttgtctttagtgcaggacacacatatgcttacacctacctttatcaccattcgttcatgaatcatgcctagctccatccttgccctgggacctactaggccttccatccaactgggaaatggggagaagcaaagctggcctcatgctcttcagggtcagttcctatctggagttgaccaggcctaccccagttgccattcctgaaaaatctcagctgccaggctgcctttagggtccctgcagacccaggagagttgagagggtgggggacacagagagaatagagaggatgtgggaactgccagagggccggagcgcaggagttcaagtggaggaatgctggctttgagccctctacactgctggttgtatgaccttggacaagtcacttcacctctctgtgcctcagcatcctcatctataaatggggatctctgaaaccttcctaccctacctacctcacagggctgttgtgaggacccagggagtttggatgtggaagtaaaagtgctgctaaaacctaaaaaaaaaaaaaaa

SEQ ID NO: 194 - DNA, 2056 bp, Homo sapiens
gcagccaggcgcgcactgcacagctctcttctctcgccgccgcccgagcgcacccttcagcccgcgcgccggccgtgagtcctcggtgctcgcccgccggccagacaaacagcccgcccgaccccgtcccgaccctggccgccccgagcggagcctggagcaaaatgatgcttcaacacccaggccaggtctctgcctcggaagtgagtgcttctgccatcgtcccctgcctgtcccctcctgggtcactggtgtttgaggattttgctaacctgacgccctttgtcaaggaagagctgaggtttgccatccagaacaagcacctctgccaccggatgtcctctgcgctggaatcagtcactgtcagcgacagacccctcggggtgtccatcacaaaagccgaggtagcccctgaagaagatgaaaggaaaaagaggcgacgagaaagaaataagattgcagctgcaaagtgccgaaacaagaagaaggagaagacggagtgcctgcagcttcagtattagcagagccacaggccgcctctgtggcatcaccagggtttctctgaagaagagggtctgcattttcctaaacccagtgctgctctcccatctcccatcttcctctcgcagcttgatgagccccggtgtgtcccaggagtcggagaagctggaaagtgtgaatgctgaactgaaggctcagattgaggagctcaagaacgagaagcagcatttgatatacatgctcaaccttcatcggcccacgtgtattgtccgggctcagaatgggaggactccagaagatgagagaaacctctttatccaacagataaaagaaggaacattgcagagctaagcagtcgtggtatgggggcgactggggagtcctcattgaatcctcattttatacccaaaaccctgaagccattggagagctgtcttcctgtgtacctctagaatcccagcagcagagaaccatcaaggcgggagggcctgcagtgattcagcaggcccttcccattctgccccagagtgggtcttggaccagggcaagtgcatctttgcctcaactccaggatttaggccttaacacactggccattcttatgttccagatggcccccagctggtgtcctgcccgcctttcatctggattctacaaaaaaccaggatgcccaccgttagattcaggcagcagtgtctgtacctcgggtgggagggatggggccatctccttcaccgtggctaccattgtcactcgtaggggatgtggagtgagaacagcatttagtgaagttgtgcaacggccagggttgtgctttctagcaaatatgctgttatgtccagaaattgtgtgtgcaagaaaactaggcaatgtactcttccgatgtttgtgtcacacaacactgatgtgacttttatatgctttttctcagatctggtttctaagagttttggggggcggggctgtcaccacgtgcagtatctcaagatattcaggtggccagaagagcttgtcagcaagaggaggaacagaattctcccagcgttaacacaaaatccatgggcagcatgatggcaggtcctctgttgcaaactcagttccaaagtcacaggaagaaagcagaaagttcaacttccaaagggttaggactctccactcaatgtcttaggtcaggagttgtgtctaggctggaagagccaaagaaatattccattttcctttccttgtggttgaaaccacagtcagtggagagatgtttggaacacagtcagtggagctggtggtaccaggtttagcattattggatgtcaaaagcattttttttgtcatgtagctgttttaagaaatctggcccagggtgtttgcagctgtgagaagtcactcacactggccacaaggacgctggctactgtctattaaaattctgatgtttctgtgaaattctcagagtgtttaattgtactcaatggtatcattacaattttctgtaagagaaaatattacttatttatcctagtattcctaacctgtcagaataataaatattgtggtaaaa

SEQ ID NO: 195 - DNA, 1462 bp, Homo sapiens
acaaccgtaacagccaccagacaagcttcagtggccggcccttcacatccagacttgcctgagaggacccacctctgagtgtccagtggtcagttgccccaggatggggaccacagccagagcagccttggtcttgacctatttggctgttgcttctgctgcctctgagggaggcttcacggctacaggacagaggcagctgaggccagagcactttcaagaagttggctacgcagctcccccctccccacccctatcccgaagcctccccatggatcaccctgactcctctcagcatggccctccctttgagggacagagtcaagtgcagccccctccctctcaggaggccacccctctccaacaggaaaagctgctacctgcccaactccctgctgaaaaggaagtgggtccccctctccctcaggaagctgtccccctccaaaaagagctgccctctctccagcaccccaatgaacagaaggaaggaacgccagctccatttggggaccagagccatccagaacctgagtcctggaatgcagcccagcactgccaacaggaccggtcccaagggggctggggccaccggctggatggcttcccccctgggcggccttctccagacaatctgaaccaaatctgccttcctaaccgtcagcatgtggtatatggtccctggaacctaccacagtccagctactcccacctcactcgccagggtgagaccctcaatttcctggagattggatattcccgctgctgccactgccgcagccacacaaaccgcctagagtgtgccaaacttgtgtgggaggatacccttgacaaatactgtgaccgggagtatgctgtgaagacccaccaccacttgtgttgccgccaccctcccagccctactcgggatgagtgctttgcccgtcgggctccttaccccaactatgaccgggacatcttgaccattgacatcagtcgagtcacccccaacctcatgggccacctctgtggaaaccaaagagttctcaccaagcataaacatattcctgggctgatccacaacatgactgcccgctgctgtgacctgccatttccagaacaggcctgctgtgcagaggaggagaaattaaccttcatcaatgatctgtgtggtccccgacgtaacatctggcgagaccctgccctctgctgttacctgagtcctggggatgaacaggtcaactgcttcaacatcaattatctgaggaacgtggctctagtgtctggagacactgagaacgccaagggccagggggagcagggctcaactggaggaacaaatatcagctccacctctgagcccaaggaagaatgagtcaccccagagccctagagggtcagatggggggaaccccaccctgccccacccatctgaacactcattacactaaacacctcttggatttggaaaaaaaaaaaaaaaaaa

SEQ ID NO: 196 - DNA, 3442 bp, Homo sapiens
agccggtgcgccgcagactagggcgcctcgggccagggagcgcggaggagccatggccaccgctaacggggccgtggaaaacgggcagccggacgggaagccgccggccctgccgcgccccatccgcaacctggaggtcaagttcaccaagatatttatcaacaatgaatggcacgaatccaagagtgggaaaaagtttgctacatgtaacccttcaactcgggagcaaatatgtgaagtggaagaaggagataagcccgacgtggacaaggctgtggaggctgcacaggttgccttccagaggggctcgccatggcgccggctggatgccctgagtcgtgggcggctgctgcaccagctggctgacctggtggagagggaccgcgccaccttggccgccctggagacgatggatacagggaagccatttcttcatgcttttttcatcgacctggagggctgtattagaaccctcagatactttgcagggtgggcagacaaaatccagggcaagaccatccccacagatgacaacgtcgtatgcttcaccaggcatgagcccattggtgtctgtggggccatcactccatggaacttccccctgctgatgctggtgtggaagctggcacccgccctctgctgtgggaacaccatggtcctgaagcctgcggagcagacacctctcaccgccctttatctcggctctctgatcaaagaggccgggttccctccaggagtggtgaacattgtgccaggattcgggcccacagtgggagcagcaatttcttctcaccctcagatcaacaagatcgccttcaccggctccacagaggttggaaaactggttaaagaagctgcgtcccggagcaatctgaagcgggtgacgctggagctgggggggaagaacccctgcatcgtgtgtgcggacgctgacttggacttggcagtggagtgtgcccatcagggagtgttcttcaaccaaggccagtgttgcacggcagcctccagggtgttcgtggaggagcaggtctactctgagtttgtcaggcggagcgtggagtatgccaagaaacggcccgtgggagaccccttcgatgtcaaaacagaacaggggcctcagattgatcaaaagcagttcgacaaaatcttagagctgatcgagagtgggaagaaggaaggggccaagctggaatgcgggggctcagccatggaagacaaggggctcttcatcaaacccactgtcttctcagaagtcacagacaacatgcggattgccaaagaggagattttcgggccagtgcaaccaatactgaagttcaaaagtatcgaagaagtgataaaaagagcgaatagcaccgactatggactcacagcagccgtgttcacaaaaaatctcgacaaagccctgaagttggcttctgccttagagtctggaacggtctggatcaactgctacaacgccctctatgcacaggctccatttggtggctttaaaatgtcaggaaatggcagagaactaggtgaatacgctttggccgaatacacagaagtgaaaactgtcaccatcaaacttggcgacaagaacccctgaaggaaaggcggggctccttcctcaaacatcggacggcggaatgtggcagatgaaatgtgctggaggaaaaaaatgacatttctgaccttcccgggacacattcttctggaggctttacatctactggagttgaatgattgctgttttcctctcactctcctgtttattcaccagactggggatgcctataggttgtctgtgaaatcgcagtcctgcctggggagggagctgttggccatttctgtgtttccctttaaaccagatcctggagacagtgagatactcagggcgttgttaacagggagtggtatttgaagtgtccagcagttgcttgaaatgctttgccgaatctgactccagtaagaatgtgggaaaaccccctgtgtgttctgcaagcagggctcttgcaccagcggtctcctcagggtggacctgcttacagagcaagccacgcctctttccgaggtgaaggtgggaccattccttgggaaaggattcacagtaaggttttttggtttttgttttttgttttcttgtttttaaaaaaaggatttcacagtgagaaagttttggttagtgcataccgtggaagggcgccagggtctttgtggattgcatgttgacattgaccgtgagattcggcttcaaaccaatactgcctttggaatatgacagaatcaatagcccagagagcttagtcaaagacgatatcacggtctaccttaaccaaggcactttcttaagcagaaaatattgttgaggttacctttgctgctaaagatccaatcttctaacgccacaacagcatagcaaatcctaggataattcacctcctcatttgacaaatcagagctgtaattcactttaacaaattacgcatttctatcacgttcactaacagcttatgataagtctgtgtagtcttccttttctccagttctgttacccaatttagattagtaaagcgtacacaactggaaagactgctgtaataacacagccttgttatttttaagtcctattttgatattaatttctgattagttagtaaataacacctggattctatggaggacctcggtcttcatccaagtggcctgagtatttcactggcaggttgtgaatttttcttttcctctttgggaatccaaatgatgatgtgcaatttcatgttttaacttgggaaactgaaagtgttcccatatagcttcaaaaacaaaaacaaatgtgttatccgacggatacttttatggttactaactagtactttcctaattgggaaagtagtgcttaagtttgcaaattaagttggggagggcaataataaaatgagggcccgtaacagaaccagtgtgtgtataacgaaaaccatgtataaaatgggcctatcacccttgtcagagatataaattaccacatttggcttcccttcatcagctaacacttatcacttatactaccaataacttgttaaatcaggatttggcttcatacactgaattttcagtattttatctcaagtagatatagacactaaccttgatagtgatacgttagagggttcctattcttccattgtacgataatgtctttaatatgaaatgctacattatttataattggtagagttattgtatctttttatagttgtaagtacacagaggtggtatatttaaacttctgtaatatactgtatttagaaatggaaatatatatagtgttaggtttcacttcttttaaggtttacccctgtggtgtggtttaaaaatctataggcctgggaattccgatcctagctgcagatcgcatcccacaatgcgagaatgataaaataaaattggatatttgaga

SEQ ID NO: 197 - DNA, 1000 bp, Homo sapiens
cccaccttcaccatgtctgacgaggaagttgaacaggtggaggagcagtacgaagaagaagaggaagcccaggaggaagaggaagttcaagaagacaccgcagaggaggacgcggaagaggagaaaccgagacccaaactcactgctcctaagatcccagaaggggagaaagtggacttcgatgacatccagaagaagcgtcagaacaaagacctaatggagctccaggccctcatcgacagccactttgaagcccggaagaaggaggaggaggagctggtcgctctcaaagagagaatcgagaagcgccgtgcagagagagcggagcagcagaggattcgtgcagagaaggagagggagcgccagaacagactggcggaggaaaaggccagaagggaggaggaggatgccaagaggagggcagaggacgacctgaagaagaagaaagcgctgtcctccatgggcgccaactacagcagctacctggccaaggctgaccagaagagaggcaagaagcagacagcccgagagatgaagaagaagattctggctgagagacgcaagccgctcaacatcgatcaccttggtgaagacaaactgagggacaaggccaaggagctctgggagaccctgcaccagctggagattgacaagttcgagtttggggagaagctgaaacgccagaaatatgacatcaccacgctcaggagccgcattgaccaggcccagaagcacagcaagaaggctgggaccccagccaagggcaaagtcggcgggcgctggaagtagagaggccagaaaggccctcgaggcagagaccctccgccctcttgcacaccagggccgctcgtgggactccacatcctccagcccccacaatcctgtcaggggtctccctgacgtcctgggggtggagaggccatcccggggcgtcccccgcgtctgtgtccttgctgccttcatcccctggggcctgtgaataaagctgcagaaccccctt

SEQ ID NO: 198 - DNA, 2328 bp, Homo sapiens
aaaggaccgaggcgtgcagcggacagcagatggatcccgcggccagcagctgcatgaggagcctccagcccccagcccctgtctggggctgccttcgaaacccccactcggaaggcaatggggcctcagggctaccccactacccgcccaccccgttctccttccaccagaaaccagacttcctggcgacagcgacggcagcgtaccctgacttctcagcctcctgcctggcagccaccccacacagcctgccccaggaggagcacatcttcactgagcagcaccccgctttcccacagtcccccaactggcacttccctgtctcagacgcccggcgcaggcccaactcaggcccggcagggggttccaaggaaatggggaccagcagcctgggcctggtggacaccacaggaggcccaggcgatgactacggggtgcttgggagcactgccaatgagacagagaagaaatcatccaggcggagaaaggagagttcagacaaccaggagaacagagggaagccggagggcagcagcaaagcccgcaaggagaggacggccttcaccaaggagcagctgcgagagctggaggcagagtttgcccatcataactacctgactcggctccgcagatatgagattgcggtaaacctggacctctctgagcgccaggtcaaagtgtggttccagaaccgaaggatgaagtggaagcgtgtgaagggaggtcagcccatctcccccaatgggcaggaccctgaggatggggactccacagcctctccaagttcagagtgagattctgcatggaggaaaaatgactaaggactgagccccctacccaactacccccaccccaatcccaccttcaccctcttccttccccagccagggcagcctctccacatctttccctgactcttggatatgaaactgcccagcattcctgggagtcttaggattttctaggaagttctgtccagcctcttagcagcctcttccctagggcctttgctcccacactctcatggaatcagacagagatcctaccgggccggatgaatctggaaacagcttcagagatactgcttctcagcgtctcttggctgccacccatgcctcctcctaccgctgttctcctaggtcagccaggcctcctcctggtctggacaccacctggcctggtgggagaggagctttggaaccagctggcgactcggaaagtaaatgcttcaaaaggaaggaaatgacagagacacacgcccttgcccaccttcctctgtaggctgcacatctgaggctttggggccccttagttgtcccgaaaccccaagaaaaatcagaatgaggagagtcaaggacagcaactcagctgctgcaagccagaaacacatccctgtctccaaatttgttggctaagtggagacacttctgagaactgactagagaagacagaaaaatagcccgatgtaggtttcggtgtccccatataggcccgtccacacaggcttgactgggtggacaagaatgaacccatgacagcacctgctgcttcaaaatcaaaatcaatttagggatacagcaggggctgttgggctgtgctccagagaaaaggagcagctactccttttaaatccacgatttctggattgaaaacctgtccagatgctgagttgttgggctgaacaactaggagctgaaaacaacgtagaggctggaaagtgtcccctgcattctggaggggaggggagataataaggagggctgctgggtgagggcctggagatgtggaaccctggagtggaaggttctccagtgacagtgtcctgtgactgcaaaaggggacaagaaaatccctcttcctccatgggatggatttaagctcttgctgtgtgttctacaaatgctgttattgtgggaggaaatgctaggtttttgtgtgtggactgcccagacctcagccaggtcttctggagatgacatttgaggactgatggccaaagagcatgggggactgaagccctggctgcctcagcgctctgtctcccaacaccagctggtgttgcagagggaggtcaacgtgagtttggatctcttgtacgcagatgtaatcattcacatgtaaaaataaccccacctccccaccccaaaaagggcaagagctgtggaaaatgattgccaaatgagatggctggttagagcatgattttttctaaagcatacttcatatattttcttaagattacatcaagctaattgtgcgagctcaattcactttgtaagaaaactctcggagaaataaaatcaataaaaagccaaaaaaaaaaataag

SEQ ID NO: 199 - DNA, 909 bp, Homo sapiens
ctttcatctgaccatccatatccaatgttctcatttaaacattacccagcatcattgtttataatcagaaactctggtccttctgtctggtggcacttagagtcttttgtgccataatgcagcagtatggagggaggattttatggagaaatggggatagtcttcatgaccacaaataaataaaggaaaactaagctgcattgtgggttttgaaaaggttattatacttcttaacaattctttttttcagggacttttctagctgtatgactgttacttgaccttctttgaaaagcattcccaaaatgctctattttagatagattaacattaaccaacataattttttttagatcgagtcagcataaatttctaagtcagcctctagtcgtggttcatctctttcacctgcattttatttggtgtttgtctgaagaaaggaaagaggaaagcaaatacgaattgtactatttgtaccaaatctttgggattcattggcaaataatttcagtgtggtgtattattaaatagaaaaaaaaaatttggtttcctaggttgaaggtctaattggatacgtttgacttatgatgaccatttatgcactttcaaatgaattggctttcaaaataactgaagagcagctgtccttctttcctcttttaagtgttcagctgtggcatgctcagaggttcctgctggattccagctgggagcggtgtgatacccttctttttcagctgttcgtgccttcctttcctgtatccaccaaagtggagacaaatacatgatctcaaagatacacagtaccttacttaattccagctgatggggagaccaaaggaatttgccagtggatgggttgggtatcctttgtaaattaaacgagggcctggaattctgcgagatcca

SEQ ID NO: 200 - DNA, 1331 bp, Homo sapiens
cccacgcgtccgcccacgcgtccgcagaaatggattcgaaatatcagtgtgtgaagctgaatgatggtcacttcatgcctgtcctgggatttggcacctatgcgcctgcagaggttcctaaaagtaaagctttagaggccaccaaattggcaattgaagctggcttccgccatattgattctgctcatttatacaataatgaggagcaggttggactggccatccgaagcaagattgcagatggcagtgtgaagagagaagacatattctacacttcaaagctttggtgcaattcccatcgaccagagttggtccgaccagccttggaaaggtcactgaaaaatcttcaattggattatgttgacctctaccttattcattttccagtgtctgtaaagccaggtgaggaagtgatcccaaaagatgaaaatggaaaaatactatttgacacagtggatctctgtgccacgtgggaggccgtggagaagtgtaaagatgcaggattggccaagtccatcggggtgtccaacttcaaccgcaggcagctggagatgatcctcaacaagccagggctcaagtacaagcctgtctgcaaccaggtggaatgtcatccttacttcaaccagagaaaactgctggatttctgcaagtcaaaagacattgttctggttgcctatagtgctctgggatcccaccgagaagaaccatgggtggacccgaactccccggtgctcttggaggacccagtcctttgtgccttggcaaaaaagcacaagcgaaccccagccctgattgccctgcgctaccagctacagcgtggggttgtggtcctggccaagagctacaatgagcagcgcatcagacagaacgtgcaggtgtttgaattccagttgacttcagaggagatgaaagccatagatggcctaaacagaaatgtgcgatatttgacccttgatatttttgctggcccccctaattatccattttctgatgaatattaacatggagggcattgcatgaggtctgccagaaggccctgcgtgtggatggtgacacagaggatggctctatgctggtgactggacacatcgcctctggttaaatctctcctgcttggtgatttcagcaagctacagcaaagcccattggccagaaaggaaagacaataattttgttttttcattttgaaaaaattaaatgctctctcctaaaaaaaaaaaaaaaaaaaaaaaaaaaaaaaaaaaaaaaaaaaaaaaaaaaaaaaaaaaaaaaaaaaaaaaaaaaaaaaaaaaaaaaaaaaaaaaaaaaaaaaaaaaaaaaaaaaaaaaaaa

SEQ ID NO: 201 - DNA, 3959 bp, Homo sapiens
gcggctccgccgccgcgaaggacagcctttccgcgcgggactccggggcgccacgggggccatgtaagcagctatcttccagagggccacactgggcatggacacccttttccctgcctggaggagcacaggtgatagtgtaattttccagtcacgaaactgctaaggccatctcaggggcgtgtgcgcaggataggcaggcggcgtccgaggaccacatagccatgccttttggtctgaagctccgccggacacggcgctacaacgtcctgagcaagaactgctttgtcacacggattcgcctgctggacagcaatgttatcgagtgcacgctgtcggtggaaagcacagggcaagaatgcctggaggctgtggcccagaggctggagctgcgagagacgcactactttggcctttggtttctcagcaagagccagcaagcacgatgggtggagctggagaaacctctgaagaaacatctggacaaattcgctaatgagcctttgcttttctttggagtcatgttctatgtgccaaatgtgtcatggcttcagcaagaggccacaagatatcagtattacctgcaagtcaaaaaagatgtgcttgaagggcgattacgatgtacattggaccaggtgattcggctagccggcctagctgtgcaagctgattttggagactataatcagtttgattctcaagatttcctcagagagtatgtgctatttcctatggatttggccctggaagaggctgttctggaggagctgacccagaaggtagcccaagaacacaaagcccacagtggaatcctgccagcagaagctgaactgatgtacatcaatgaagttgaacgtttggatggatttggacaggaaatcttccctgtaaaggacaatcatggaaactgtgtacaccttggcattttctttatggggattttcgtgaggaacagaattggaagacaagcggtaatatacaggtggaatgacatggggaatatcactcataacaagtcgaccattctagtggagctcatcaacaaagaagagactgccctctttcacacggatgatatcgaaaatgccaagtatatttctcggttgtttgccacacgacacaagttttacaaacaaaacaaaatctgcactgaacagtcaaattctccaccccccatcagacgccagcccacctggagccgatcctctctgcccaggcagcagccgtacatcctgcctcccgttcacgtccagtgtggtgagcactactcggaaacgcacacctcgcaagacagcatttttcatgggaatgaagaagccttgtattgcaactctcacaacagcctggacttaaattatttaaatggcactgtcaccaatggcagcgtgtgtagcgttgacagcgtcaactccctcaactgctcgcaaagtttcatccaggcctcccctgtatcctccaacctcagtatccctgggagtgacatcatgcgggccgactacatcccgagccaccggcacagcgcgatcatcgtgccctcgtacaggccaacccccgattatgagacagtcatgcgccagatgaagagggggatcctgcatacagacagccagagccagtctctgagaaacctcaacattatcaacacccatgcctacaaccagccagaggatctggtgtacagccaaccggagatgcgggagaggcacccctacactgtcccttatgggccacagggggtctacagcaacaaacttgtcagtccatctgaccagaggaacccaaagaataatgtggtaccaagcaagccgggggcaagcgccatctcgcacacggtgagcaccccagagctggccaacatgcagctgcagggcagccataactacagcacggcccacatgcttaagaactatctcttcaggccaccgcccccctacccacggccacgacctgccaccagcaccccagacctggccagccaccgccacaagtacgtcagcggcagcagcccggacctggtgacccggaaggtgcagctctcggtgaagaccttccaagaggacagctctccggtggttcatcagtctctccaggaggtgagcgagcccctcacggccaccaagcaccacggcactgtgaacaagcgccacagcctggaggtgatgaacagcatggtgcggggcatggaggccatgacgctcaagtcgctccacctccccatggctcgccgcaacacgctccgggagcagggaccgcccgaggaggggtcaggcagccacgaggtcccccagctccctcagtatcaccacaagaagaccttctctgatgccactatgctaatccacagcagcgagagtgaggaggaggaggaggaggctccagaatcggtgccccagatccccatgctccgggagaagatggagtacagtgcccagctgcaggcggccctggcccgcatccccaacaagcccccgcctgagtaccccggtccaaggaagagtgtgagcaatggggctctgaggcaggaccaagccagccttcctcccgccatggccagagccagggtgctgaggcatgggccagccaaggccatcagcatgtctcggactgacccgccggctgtcaacggggcctctctcggcccatccatctcggaacccgacctgactagtgtgaaggagcgggtcaaaaaagagcctgtgaaggagagacctgtgtctgaaatgttttccctggaagacagcattatagagagagagatgatgatcaggaatctagagaagcagaagatggcaggcctggaggcacagaagaggccgctgatgttggcagcattgaatgggctctcggtggctcgagtctcagggcgggaagagaatcgagttgatgccacccgggttcccatggacgagaggttcagaaccctgaagaagaaactagaagagggaatggtgttcacagaatatgagcaaattccaaagaaaaaggcgaatggcattttcagcacagcagctctgccagaaaacgccgagcgcagccgaatccgtgaagttgtcccctatgaggagaatcgagtagagctgataccaaccaaagaaaataacacaggatacattaatgcctcccacatcaaggtggtggttggcggggcagaatggcactacatagccacccaggggcccctgccacacacgtgccacgacttctggcagatggtgtgggagcagggagtgaatgtgattgccatggtcactgcagaggaggagggtggacgaaccaaaagccaccgatactggcccaaactaggttcaaagcacagctcagccacctatggcaagttcaaggtcaccacgaagtttcgaacggattctgtttgctatgcaaccacgggcttgaaggtcaagcaccttttgtctgggcaagaaaggacggtgtggcatttacaatatactgactggccagatcacggctgtccagaagatgtccaaggatttttatcctacttggaggagatccagtcggtccgtcgccataccaacagcatgctggaaggcaccaagaaccggcacccgcccatcgtggtccactgtagtgctggggtgggaaggaccggcgtgctcattctttctgagctgatgatctactgcttggaacataacgaaaaggtggaagtgcccatgatgctgaggctcctcagggagcagaggatgttcatgatccagactatcgctcagtacaagtttgtctaccaagtcctcatccagttcctccaaaactccagactcatttaatcaccccaatccagctcctggaggagggacccagctccatcgcgctggaggagagtcacctccagacaacatctgctccccccacaggggtgcaggtggctggcagcaaacaggctctctgaagacagtagccaagattattcacacataccatgtattattttatatgag

SEQ ID NO: 202 - DNA, 3680 bp, Homo sapiens
ggcacgaggctggggcgcagagcagcggcgggaggaggcggacacgtggcaacagcggtagcagcccgggcggcggcagcaacagcggcggcggcatcggcccgagccgccggccgccctcccaccctcccgccccgcggcagccctagctccctccacttggctcccctggtcccgctcgctcggccgggagctgctctgtgcttttctctctgattctccagcgacaggacccggcgccgggcactgagcaccgccaccatggggaagggggttggacgtgataagtatgagcctgcagctgtttcagaacaaggtgataaaaagggcaaaaagggcaaaaaagacagggacatggatgaactgaagaaagaagtttctatggatgatcataaacttagccttgatgaacttcatcgtaaatatggaacagacttgagccggggattaacatctgctcgtgcagctgagatcctggcgcgagatggtcccaacgccctcactccccctcccactactcctgaatggatcaagttttgtcggcagctctttggggggttctcaatgttactgtggattggagcgattctttgtttcttggcttatagcatccaagctgctacagaagaggaacctcaaaacgataatctgtacctgggtgtggtgctatcagccgttgtaatcataactggttgcttctcctactatcaagaagctaaaagttcaaagatcatggaatccttcaaaaacatggtccctcagcaagcccttgtgattcgaaatggtgagaaaatgagcataaatgcggaggaagttgtggttggggatctggtggaagtaaaaggaggagaccgaattcctgctgacctcagaatcatatctgcaaatggctgcaaggtggataactcctcgctcactggtgaatcagaaccccagactaggtctccagatttcacaaatgaaaaccccctggagacgaggaacattgccttcttttcaaccaattgtgttgaaggcaccgcacgtggtattgttgtctacactggggatcgcactgtgatgggaagaattgccacacttgcttctgggctggaaggaggccagacccccattgctgcagaaattgaacattttatccacatcatcacgggtgtggctgtgttcctgggtgtgtctttcttcatcctttctctcatccttgagtacacctggcttgaggctgtcatcttcctcatcggtatcatcgtagccaatgtgccggaaggtttgctggccactgtcacggtctgtctgacacttactgccaaacgcatggcaaggaaaaactgcttagtgaagaacttagaagctgtggagaccttggggtccacatccaccatctgctctgataaaactggaactctgactcagaaccggatgacagtggcccacatgtggtttgacaatcaaatccatgaagctgatacgacagagaatcagagtggtgtctcttttgacaagacttcagctacctggcttgctctgtccagaattgcaggtctttgtaacagggcagtgtttcaggctaaccaggaaaacctacctattcttaagcgggcagttgcaggagatgcctctgagtcagcactcttaaagtgcatagagctgtgctgtggttccgtgaaggagatgagagaaagatacgccaaaatcgtcgagatacccttcaactccaccaacaagtaccagttgtctattcataagaaccccaacacatcagagccccaacacctgttggtgatgaagggcgccccagaaaggatcctagaccgttgcagctctatcctcctccacggcaaggagcagcccctggatgaggagctgaaagacgcctttcagaacgcctatttggagctggggggcctcggagaacgagtcctaggtttctgccacctctttctgccagatgaacagtttcctgaagggttccagtttgacactgacgatgtgaatttccctatcgataatctgtgctttgttgggctcatctccatgattgaccctccacgggcggccgttcctgatgccgtgggcaaatgtcgaagtgctggaattaaggtcatcatggtcacaggagaccatccaatcacagctaaagctattgccaaaggtgtgggcatcatctcagaaggcaatgagaccgtggaagacattgctgcccgcctcaacatcccagtcagccaggtgaaccccagggatgccaaggcctgcgtagtacacggcagtgatctaaaggacatgacctccgagcagctggatgacattttgaagtaccacactgagatagtgtttgccaggacctcccctcagcagaagctcatcattgtggaaggctgccaaagacagggtgctatcgtggctgtgactggtgacggtgtgaatgactctccagctttgaagaaagcagacattggggttgctatggggattgctggctcagatgtgtccaagcaagctgctgacatgattcttctggatgacaactttgcctcaattgtgactggagtagaggaaggtcgtctgatctttgataacttgaagaaatccattgcttataccttaaccagtaacattcccgagatcaccccgttcctgatatttattattgcaaacattccactaccactggggactgtcaccatcctctgcattgacttgggcactgacatggttcctgccatctccctggcttatgagcaggctgagagtgacatcatgaagagacagcccagaaatcccaaaacagacaaacttgtgaatgagcggctgatcagcatggcctatgggcagattggaatgatccaggccctgggaggcttctttacttactttgtgattctggctgagaacggcttcctcccaattcacctgttgggcctccgagtggactgggatgaccgctggatcaacgatgtggaagacagctacgggcagcagtggacctatgagcagaggaaaatcgtggagttcacctgccacacagccttcttcgtcagtatcgtggtggtgcagtgggccgacttggtcatctgtaagaccaggaggaattcggtcttccagcaggggatgaagaacaagatcttgatatttggcctctttgaagagacagccctggctgctttcctttcctactgccctggaatgggtgttgctcttaggatgtatcccctcaaacctacctggtggttctgtgccttcccctactctcttctcatcttcgtatatgacgaagtcagaaaactcatcatcaggcgacgccctggcggctgggtggagaaggaaacctactattagccccccgtcctgcacgccgtggagcatcaggccacacactctgcatccgacacccaccccctctttgtgtacttcagtcttggagtttggaactctaccctggtaggaaagcaccgcagcatgtggggaagcaagacgtcctggaatgaagcatgtagctctatggggggaggggggagggctgcctgaaaaccatccatctgtggaaatgacagcggggaaggtttttatgtgcctttttgtttttgtaaaaaaggaacacccggaaagactgaaagaatacattttatatctggatttttacaaataaagatggctattataatggaaaaaaaaaaaaaaaaaaa

SEQ ID NO: 203 - DNA, 2444 bp, Homo sapiens
ggttttttttttttaccccccttttttatttattatttttttgcacattgagcggatccttgggaacgagagaaaaaagaaacccaaactcacgcgtgcagaagatctccccccccttcccctcccctcctccctcttttcccctccccaggagaaaaagacccccaagcagaaaaaagttcaccttggactcgtctttttcttgcaatattttttgggggggcaaaactttgagggggtgattttttttggcttttcttcctccttcatttttcttccaaaattgctgctggtgggtgaaaaaaaaatgccgcagctgaacggcggtggaggggatgacctaggcgccaacgacgaactgatttccttcaaagacgagggcgaacaggaggagaagagctccgaaaactcctcggcagagagggatttagctgatgtcaaatcgtctctagtcaatgaatcagaaacgaatcaaaacagctcctccgattccgaggcggaaagacggcctccgcctcgctccgaaagtttccgagacaaatcccgggaaagtttggaagaagcggccaagaggcaagatggagggctctttaaggggccaccgtatcccggctaccccttcatcatgatccccgacctgacgagcccctacctccccaacggatcgctctcgcccaccgcccgaacctatctccagatgaaatggccactgcttgatgtccaggcagggagcctccagagtagacaagccctcaaggatgcccggtccccatcaccggcacacattgtctctaacaaagtgccagtggtgcagcaccctcaccatgtccaccccctcacgcctcttatcacgtacagcaatgaacacttcacgccgggaaacccacctccacacttaccagccgacgtagaccccaaaacaggaatcccacggcctccgcaccctccagatatatccccgtattacccactatcgcctggcaccgtaggacaaatcccccatccgctaggatggttagtaccacagcaaggtcaaccagtgtacccaatcacgacaggaggattcagacacccctaccccacagctctgaccgtcaatgcttccgtgtccaggttccctccccatatggtcccaccacatcatacgctacacacgacgggcattccgcatccggccatagtcacaccaacagtcaaacaggaatcgtcccagagtgatgtcggctcactccatagttcaaagcatcaggactccaaaaaggaagaagaaaagaagaagccccacataaagaaacctcttaatgcattcatgttgtatatgaaggaaatgagagcaaaggtcgtagctgagtgcacgttgaaagaaagcgcggccatcaaccagatccttgggcggaggtggcatgcactgtccagagaagagcaagcgaaatactacgagctggcccggaaggagcgacagcttcatatgcaactgtaccccggctggtccgcgcgggataactatggaaagaagaagaagaggaaaagggacaagcagccgggagagaccaatgaacacagcgaatgtttcctaaatccttgcctttcacttcctccgattacagacctcagcgctcctaagaaatgccgagcgcgctttggccttgatcaacagaataactggtgcggcccttgcaggagaaaaaaaaagtgcgttcgctacatacaaggtgaaggcagctgcctcagcccaccctcttcagatggaagcttactagattcgcctcccccctccccgaacctgctaggctcccctccccgagacgccaagtcacagactgagcagacccagcctctgtcgctgtccctgaagcccgaccccctggcccacctgtccatgatgcctccgccacccgccctcctgctcgctgaggccacccacaaggcctccgccctctgtcccaacggggccctggacctgcccccagccgctttgcagcctgccgccccctcctcatcaattgcacagccgtcgacttcttggttacattcccacagctccctggccgggacccagccccagccgctgtcgctcgtcaccaagtctttagaatagctttagcgtcgtgaaccccgctgctttgtttatggttttgtttcacttttcttaatttgccccccacccccaccttgaaaggttttgttttgtactctcttaattttgtgccatgtggctacattagttgatgtttatcgagttcattggtcaatatttgacccattcttatttcaatttctccttttaaatatgtagatgagagaagaacctcatgattggtaccaaaatttttatcaacagctgtttaaagtctttgtagcgtttaaaaaatatatatatatacataactgttatgtagttcggatagcttagttttaaaagactgattaaaaaacaaaaaaaa

SEQ ID NO: 204 - DNA, 539 bp, Homo sapiens
  misc_feature (344)..(344): N may be C, G, T or A
ttctttttcttttttcttttaaagggggagggcataacaaagaatgacaaaaacaaaaaaactgaacccaaaaggcatggctggggtctgtgtctttgtcagctgcagtttcaaaactaaaagataaatttgatgccaggtaaaggtggcagggctgctatgaccgagtctgagagggacttctttgcccgctgctttggggcccacaatttttctctgccgagagtggggccacaaatactgcgaaactatctccgtggtggtcaatgtgagtaataagagggcctctggctgcttctggaaaaataatgggggcaaagggggttaaaaacatcattttatgngggggggggggagggctctcccccccccccacgggttttaaaaagaggtggggggccgggggagcctggttttagggggtcaatccgggggccactttttgaattcctgaacaaatcccagtgcttgtagttaagaccatttacaaaccccaacagcccacaattttggtggctccttggggctcccaagctccc

SEQ ID NO: 205 - DNA, 2639 bp, Homo sapiens
ataccccattttgcaaacaggaaagctgaggctcagggaggcaccaaagcttactcccatcctggggcttggcagggggtgcccgcagcacccggggacatacaccggggagtctcctgggaaagaagtgccggcccaggggcagactcttttctgctctgccatgtcttccctgcacccccagggatgatgagtctgggaggggctggtcagccatgaaagcttcggggaggggccggtggccaggctgggcaccccagagctccacaggcagacatggtgtgggggtgtcaggaagagggcctggctgctgggtgctacggtaggaagatcccggtgctgtgggagtggagcaggtggttgaatgccaggctggcttggtccttctctctgggtgccggctgtggctcccgcccaggtgggcaccacgtctgaataatgtatgaagcctctggttgcgtggaggatgggagcgcttcgggcagcatctgtgggcagagacttcagggatgtgaggtacatctgggcatggctagctgggaaggaaagaggatggcagagcctcgagccgttgccagggactggttgcgtgtcccagaacgtgccaaaagcctgcctcgtgagcacggcaagagctctgccagggcagtcccagctggcccaggcgccgcagcgctcccgagggccgtcgagcaaaggcgggaggcgcagccgggctgtcggtggacctgtaggtatcagggctccttggtcccctcctgcgggaagcaggcaccgagtggggctgcatgtagacgcatgcgagggtgagagctgcggcggaggacgctgatcgcggagtgcaggcgagggccccagaaaggtcccgcaggtcgcctcgctcgtggcacgggctcggcagcgttgtggttagtgacacggaggaagacagaaagccatatgcacagcacgcagaacaggaggaggggggaagaaagagcaggcacggggcaggcagagccgcagccacgccgccgggatgcagcaggcagggccacccacgagcagggcggggccctaacctccgacccaggctggtcgccgcagatgggggcagagatgtgaaacagctacagagcgggacaagggtgctgccggcacagggctgaccacagagcacatcaaaagaggcccactgctcagtggagcgtggaggacgaggaggaggccgtccacgagcaatgccagcatgagagagacaggcagcttcaggcccaggacgaggagggaggcggccatgtccccgagcggccgaagcaggagatgctcctcagcctgaagccctcggaggcccctgaactggatgaggacgagggctttggcgactggtcccagaggccagagcagcggcagcagcacgagggggcgcagggcaccttggacagcggagagcccccccagtgcaggagtcctgagggggagcaagaggacaggcccggcctgcatgcctacgaaaaggaggacagtgatgaagtccacctggaggagttgagtctgagcaaggaggggccaggcccagaggacactgtccaggacaacctgggggccgcaggggctgaggaggaacaggaggagcaccagaaatgtcagcagcccaggacacccagccccttggtcttggaggggaccatcgaacagagctcgcctcccctgagccctaccaccaaactcatcgacaggaccgagtccctaaaccgctccatagagaagagtaacagtgtgaagaaatcccagccagacttgcccatctccaagattgatcagtggctggaacaatacacccaggccatcgagaccgctggccggacccccaagctagcccgccaggcctccatagagctgcccagcatggctgtggccagtaccaagagtcggtgggagacgggtgaggtacaggctcagtctgcggccaagactccgtcctgcaaggatattgtggctggagacatgagcaagaaaagcctctgggagcagaagggaggctccaagacctcatcaacaattaagagcaccccatctgggaagaggtataagtttgtggccaccgggcatgggaagtatgagaaggtgcttgtggaagggggcccggctccctaggcgtcccatctcgcttcctgggtctgcaggtccagccggctggcaccctccatgtacccaggggagattccagccagacacccgccccccggccctggctaagaagttgcttcctgttgccagcatgacctaccctcgcctctttgatgccatccgctgccacctccttttgctcctggaccctttagcctctctgcccttccactctctgaccaccgcccccgccctccccacccagctccgcttcttgttacttgggggaggaaagaaactcctgatcattggccaaagggacttacccctggagaggccaagtgccttctaggaagttaggaggttgaggcacagcctgtgcagagagggtgggtcacccccccagatccaaggggaaactgcaggtcaagggctgataacggccatgcaggatgcttgatgctgcgtcccccgctgcttgccgccccccaccccgccattttgtataataaagctccctgtgtattctc

SEQ ID NO: 206 - DNA, 14896 bp, Homo sapiens
cagcggtgcgagctccaggcccatgcactgaggaggcggaaacaaggggagcccccagagctccatcaagccccctccaaaggctcccctacccggtccacgccccccaccccccctccccgcctcctcccaattgtgcatttttgcagccggaggcggctccgagatggggctgtgagcttcgcccggggagggggaaagagcagcgaggagtgaagcgggggggtggggtgaagggtttggatttcggggcagggggcgcacccccgtcagcaggccctccccaaggggctcggaactctacctcttcacccacgcccctggtgcgctttgccgaaggaaagaataagaacagagaaggaggagggggaaaggaggaaaagggggaccccccaactggggggggtgaaggagagaagtagcaggaccagaggggaaggggctgctgcttgcatcagcccacaccatgctgaccccgccgttgctcctgctgctgcccctgctctcagctctggtcgcggcggctatcgacgcccctaagacttgcagccccaagcagtttgcctgcagagatcaaataacctgtatctcaaagggctggcggtgcgacggtgagagggactgcccagacggatctgacgaggcccctgagatttgtccacagagtaaggcccagcgatgccagccaaacgagcataactgcctgggtactgagctgtgtgttcccatgtcccgcctctgcaatggggtccaggactgcatggacggctcagatgaggggccccactgccgagagctccaaggcaactgctctcgcctgggctgccagcaccattgtgtccccacactcgatgggcccacctgctactgcaacagcagctttcagcttcaggcagatggcaagacctgcaaagattttgatgagtgctcagtgtacggcacctgcagccagctatgcaccaacacagacggctccttcatatgtggctgtgttgaaggatacctcctgcagccggataaccgctcctgcaaggccaagaacgagccagtagaccggccccctgtgctgttgatagccaactcccagaacatcttggccacgtacctgagtggggcccaggtgtctaccatcacacctacgagcacgcggcagaccacagccatggacttcagctatgccaacgagaccgtatgctgggtgcatgttggggacagtgctgctcagacgcagctcaagtgtgcccgcatgcctggcctaaagggcttcgtggatgagcacaccatcaacatctccctcagtctgcaccacgtggaacagatggccatcgactggctgacaggcaacttctactttgtggatgacatcgatgataggatctttgtctgcaacagaaatggggacacatgtgtcacattgctagacctggaactctacaaccccaagggcattgccctggaccctgccatggggaaggtgtttttcactgactatgggcagatcccaaaggtggaacgctgtgacatggatgggcagaaccgcaccaagctcgtcgacagcaagattgtgtttcctcatggcatcacgctggacctggtcagccgccttgtctactgggcagatgcctatctggactatattgaagtggtggactatgagggcaagggccgccagaccatcatccagggcatcctgattgagcacctgtacggcctgactgtgtttgagaattatctctatgccaccaactcggacaatgccaatgcccagcagaagacgagtgtgatccgtgtgaaccgctttaacagcaccgagtaccaggttgtcacccgggtggacaagggtggtgccctccacatctaccaccagaggcgtcagccccgagtgaggagccatgcctgtgaaaacgaccagtatgggaagccgggtggctgctctgacatctgcctgctggccaacagccacaaggcgcggacctgccgctgccgttccggcttcagcctgggcagtgacgggaagtcatgcaagaagccggagcatgagctgttcctcgtgtatggcaagggccggccaggcatcatccggggcatggatatgggggccaaggtcccggatgagcacatgatccccattgaaaacctcatgaacccccgagccctggacttccacgctgagaccggcttcatctactttgccgacaccaccagctacctcattggccgccagaagattgatggcactgagcgggagaccatcctgaaggacggcatccacaatgtggagggtgtggccgtggactggatgggagacaatctgtactggacggacgatgggcccaaaaagacaatcagcgtggccaggctggagaaagctgctcagacccgcaagactttaatcgagggcaaaatgacacaccccagggctattgtggtggatccactcaatgggtggatgtactggacagactgggaggaggaccccaaggacagtcggcgtgggcggctggagagggcgtggatggatggctcacaccgagacatctttgtcacctccaagacagtgctttggcccaatgggctaagcctggacatcccggctgggcgcctctactgggtggatgccttctacgaccgcatcgagacgatactgctcaatggcacagaccggaagattgtgtatgaaggtcctgagctgaaccacgcctttggcctgtgtcaccatggcaactacctcttctggactgagtatcggagtggcagtgtctaccgcttggaacggggtgtaggaggcgcaccccccactgtgacccttctgcgcagtgagcggccccccatctttgagatccgaatgtatgatgcccagcagcagcaagttggcaccaacaaatgccgggtgaacaatggcggctgcagcagcctgtgcttggccacccctgggagccgccagtgcgcctgtgctgaggaccaggtgttggacgcagacggcgtcacttgcttggcgaacccatcctacgtgcctccaccccagtgccagccaggcgagtttgcctgtgccaacagccgctgcatccaggagcgctggaagtgtgacggagacaacgattgcctggacaacagtgatgaggccccagccctctgccatcagcacacctgcccctcggaccgattcaagtgcgagaacaaccggtgcatccccaaccgctggctctgcgacggggacaatgactgtgggaacagtgaagatgagtccaatgccacttgttcagcccgcacctgcccccccaaccagttctcctgtgccagtggccgctgcatccccatctcctggacgtgtgatctggatgacgactgtggggaccgctctgatgagtctgcttcgtgtgcctatcccacctgcttccccctgactcagtttacctgcaacaatggcagatgtatcaacatcaactggagatgcgacaatgacaatgactgtggggacaacagtgacgaagccggctgcagccactcctgttctagcacccagttcaagtgcaacagcgggcgttgcatccccgagcactggacctgcgatggggacaatgactgcggagactacagtgatgagacacacgccaactgcaccaaccaggccacgaggccccctggtggctgccacactgatgagttccagtgccggctggatggactatgcatccccctgcggtggcgctgcgatggggacactgactgcatggactccagcgatgagaagagctgtgagggagtgacccacgtctgcgatcccagtgtcaagtttggctgcaaggactcagctcggtgcatcagcaaagcgtgggtgtgtgatggcgacaatgactgtgaggataactcggacgaggagaactgcgagtccctggcctgcaggccaccctcgcacccttgtgccaacaacacctcagtctgcctgccccctgacaagctgtgtgatggcaacgacgactgtggcgacggctcagatgagggcgagctctgcgaccagtgctctctgaataacggtggctgcagccacaactgctcagtggcacctggcgaaggcattgtgtgttcctgccctctgggcatggagctggggcccgacaaccacacctgccagatccagagctactgtgccaagcatctcaaatgcagccaaaagtgcgaccagaacaagttcagcgtgaagtgctcctgctacgagggctgggtcctggaacctgacggcgagagctgccgcagcctggaccccttcaagccgttcatcattttctccaaccgccatgaaatccggcgcatcgatcttcacaaaggagactacagcgtcctggtgcccggcctgcgcaacaccatcgccctggacttccacctcagccagagcgccctctactggaccgacgtggtggaggacaagatctaccgcgggaagctgctggacaacggagccctgactagtttcgaggtggtgattcagtatggcctggccacacccgagggcctggctgtagactggattgcaggcaacatctactgggtggagagtaacctggatcagatcgaggtggccaagctggatgggaccctccggaccaccctgctggccggtgacattgagcacccaagggcaatcgcactggatccccgggatgggatcctgttttggacagactgggatgccagcctgccccgcattgaggcagcctccatgagtggggctgggcgccgcaccgtgcaccgggagaccggctctgggggctggcccaacgggctcaccgtggactacctggagaagcgcatcctttggattgacgccaggtcagatgccatttactcagcccgttacgacggctctggccacatggaggtgcttcggggacacgagttcctgtcgcacccgtttgcagtgacgctgtacgggggggaggtctactggactgactggcgaacaaacacactggctaaggccaacaagtggaccggccacaatgtcaccgtggtacagaggaccaacacccagccctttgacctgcaggtgtaccacccctcccgccagcccatggctcccaatccctgtgaggccaatgggggccagggcccctgctcccacctgtgtctcatcaactacaaccggaccgtgtcctgcgcctgcccccacctcatgaagctccacaaggacaacaccacctgctatgagtttaagaagttcctgctgtacgcacgtcagatggagatccgaggtgtggacctggatgctccctactacaactacatcatctccttcacggtgcccgacatcgacaacgtcacagtgctagactacgatgcccgcgagcagcgtgtgtactggtctgacgtgcggacacaggccatcaagcgggccttcatcaacggcacaggcgtggagacagtcgtctctgcagacttgccaaatgcccacgggctggctgtggactgggtctcccgaaacctgttctggacaagctatgacaccaataagaagcagatcaatgtggcccggctggatggctccttcaagaacgcagtggtgcagggcctggagcagccccatggccttgtcgtccaccctctgcgtgggaagctctactggaccgatggtgacaacatcagcatggccaacatggatggcagcaatcgcaccctgctcttcagtggccagaagggccccgtgggcctggctattgacttccctgaaagcaaactctactggatcagctccgggaaccataccatcaaccgctgcaacctggatgggagtgggctggaggtcatcgatgccatgcggagccagctgggcaaggccaccgccctggccatcatgggggacaagctgtggtgggctgatcaggtgtcggaaaagatgggcacatgcagcaaggctgacggctcgggctccgtggtccttcggaacagcaccaccctggtgatgcacatgaaggtctatgacgagagcatccagctggaccataagggcaccaacccctgcagtgtcaacaacggtgactgctcccagctctgcctgcccacgtcagagacgacccgctcctgcatgtgcacagccggctatagcctccggagtggccagcaggcctgcgagggcgtaggttcctttctcctgtactctgtgcatgagggaatcaggggaattcccctggatcccaatgacaagtcagatgccctggtcccagtgtccgggacctcgctggctgtcggcatcgacttccacgctgaaaatgacaccatctactgggtggacatgggcctgagcacgatcagccgggccaagcgggaccagacgtggcgtgaagacgtggtgaccaatggcattggccgtgtggagggcattgcagtggactggatcgcaggcaacatctactggacagaccagggctttgatgtcatcgaggtcgcccggctcaatggctccttccgctacgtggtgatctcccagggtctagacaagccccgggccatcaccgtccacccggagaaagggtacttgttctggactgagtggggtcagtatccgcgtattgagcggtctcggctagatggcacggagcgtgtggtgctggtcaacgtcagcatcagctggcccaacggcatctcagtggactaccaggatgggaagctgtactggtgcgatgcacggacagacaagattgaacggatcgacctggagacaggtgagaaccgcgaggtggttctgtccagcaacaacatggacatgttttcagtgtctgtgtttgaggatttcatctactggagtgacaggactcatgccaacggctctatcaagcgcgggagcaaagacaatgccacagactccgtgcccctgcgaaccggcatcggcgtccagcttaaagacatcaaagtcttcaaccgggaccggcagaaaggcaccaacgtgtgcgcggtggccaatggcgggtgccagcagctgtgcctgtaccggggccgtgggcagcgggcctgcgcctgtgcccacgggatgctggctgaagacggagcatcgtgccgcgagtatgccggctacctgctctactcagagcgcaccattctcaagagtatccacctgtcggatgagcgcaacctcaatgcgcccgtgcagcccttcgaggaccctgagcacatgaagaacgtcatcgccctggcctttgactaccgggcaggcacctctccgggcacccccaatcgcatcttcttcagcgacatccactttgggaacatccaacagatcaacgacgatggctccaggaggatcaccattgtggaaaacgtgggctccgtggaaggcctggcctatcaccgtggctgggacactctctattggacaagctacacgacatccaccatcacgcgccacacagtggaccagacccgcccaggggccttcgagcgtgagaccgtcatcactatgtctggagatgaccacccacgggccttcgttttggacgagtgccagaacctcatgttctggaccaactggaatgagcagcatcccagcatcatgcgggcggcgctctcgggagccaatgtcctgacccttatcgagaaggacatccgtacccccaatggcctggccatcgaccaccgtgccgagaagctctacttctctgacgccaccctggacaagatcgagcggtgcgagtatgacggctcccaccgctatgtgatcctaaagtcagagcctgtccaccccttcgggctggccgtgtatggggagcacattttctggactgactgggtgcggcgggcagtgcagcgggccaacaagcacgtgggcagcaacatgaagctgctgcgcgtggacatcccccagcagcccatgggcatcatcgccgtggccaacgacaccaacagctgtgaactctctccatgccgaatcaacaacggtggctgccaggacctgtgtctgctcactcaccagggccatgtcaactgctcatgccgagggggccgaatcctccaggatgacctcacctgccgagcggtgaattcctcttgccgagcacaagatgagtttgagtgtgccaatggcgagtgcatcaacttcagcctgacctgcgacggcgtcccccactgcaaggacaagtccgatgagaagccatcctactgcaactcccgccgctgcaagaagactttccggcagtgcagcaatgggcgctgtgtgtccaacatgctgtggtgcaacggggccgacgactgtggggatggctctgacgagatcccttgcaacaagacagcctgtggtgtgggcgagttccgctgccgggacgggacctgcatcgggaactccagccgctgcaaccagtttgtggattgtgaggacgcctcagatgagatgaactgcagtgccaccgactgcagcagctacttccgcctgggcgtgaagggcgtgctcttccagccctgcgagcggacctcactctgctacgcacccagctgggtgtgtgatggcgccaatgactgtggggactacagtgatgagcgcgactgcccaggtgtgaaacgccccagatgccctctgaattacttcgcctgccctagtgggcgctgcatccccatgagctggacgtgtgacaaagaggatgactgtgaacatggcgaggacgagacccactgcaacaagttctgctcagaggcccagtttgagtgccagaaccatcgctgcatctccaagcagtggctgtgtgacggcagcgatgactgtggggatggctcagacgaggctgctcactgtgaaggcaagacgtgcggcccctcctccttctcctgccctggcacccacgtgtgcgtccccgagcgctggctctgtgacggtgacaaagactgtgctgatggtgcagacgagagcatcgcagctggttgcttgtacaacagcacttgtgacgaccgtgagttcatgtgccagaaccgccagtgcatccccaagcacttcgtgtgtgaccacgaccgtgactgtgcagatggctctgatgagtcccccgagtgtgagtacccgacctgcggccccagtgagttccgctgtgccaatgggcgctgtctgagctcccgccagtgggagtgtgatggcgagaatgactgccacgaccagagtgacgaggctcccaagaacccacactgcaccagcccagagcacaagtgcaatgcctcgtcacagttcctgtgcagcagtgggcgctgtgtggctgaggcactgctctgcaacggccaggatgactgtggcgacagctcggacgagcgtggctgccacatcaatgagtgtctcagccgcaagctcagtggctgcagccaggactgtgaggacctcaagatcggcttcaagtgccgctgtcgccctggcttccggctgaaggatgacggccggacgtgtgctgatgtggacgagtgcagcaccaccttcccctgcagccagcgctgcatcaacacccatggcagctataagtgtctgtgtgtggagggctatgcaccccgcggcggcgacccccacagctgcaaggctgtgactgacgaggaaccgtttctgatcttcgccaaccggtactacctgcgcaagctcaacctggacgggtccaactacacgttacttaagcagggcctgaacaacgccgttgccttggattttgactaccgagagcagatgatctactggacagatgtgaccacccagggcagcatgatccgaaggatgcaccttaacgggagcaatgtgcaggtcctacaccgtacaggcctcagcaaccccgatgggctggctgtggactgggtgggtggcaacctgtactggtgcgacaaaggccgggacaccatcgaggtgtccaagctcaatggggcctatcggacggtgctggtcagctctggcctccgtgagcccagggctctggtggtggatgtgcagaatgggtacctgtactggacagactggggtgaccattcactgatcggccgcatcggcatggatgggtccagccgcagcgtcatcgtggacaccaagatcacatggcccaatggcctgacgctggactatgtcactgagcgcatctactgggccgacgcccgcgaggactacattgaatttgccagcctggatggctccaatcgccacgttgtgctgagccaggacatcccgcacatctttgcactgaccctgtttgaggactacgtctactggaccgactgggaaacaaagtccattaaccgagcccacaagaccacgggcaccaacaaaacgctcctcatcagcacgctgcaccggcccatggacctgcatgtcttccatgccctgcgccagccagacgtgcccaatcacccctgcaaggtcaacaatggtggctgcagcaacctgtgcctgctgtcccccgggggagggcacaaatgtgcctgccccaccaacttctacctgggcagcgatgggcgcacctgtgtgtccaactgcacggctagccagtttgtatgcaagaacgacaagtgcatccccttctggtggaagtgtgacaccgaggacgactgcggggaccactcagacgagcccccggactgccctgagttcaagtgccggcccggacagttccagtgctccacaggtatctgcacaaaccctgccttcatctgcgatggcgacaatgactgccaggacaacagtgacgaggccaactgtgacatccacgtctgcttgcccagtcagttcaaatgcaccaacaccaaccgctgtattcccggcatcttccgctgcaatgggcaggacaactgcggagatggggaggatgagagggactgccccgaggtgacctgcgcccccaaccagttccagtgctccattaccaaacggtgcatcccccgggtctgggtctgcgaccgggacaatgactgtgtggatggcagtgatgagcccgccaactgcacccagatgacctgtggtgtggacgagttccgctgcaaggattcgggccgctgcatcccagcgcgttggaagtgtgacggagaggatgactgtggggatggctcggatgagcccaaggaagagtgtgatgaacgcacctgtgagccataccagttccgctgcaagaacaaccgctgcgtgcccggccgctggcagtgcgactacgacaacgattgcggtgacaactccgatgaagagagctgcacccctcggccctgctccgagagtgagttctcctgtgccaacggccgctgcatcgcggggcgctggaaatgcgatggagaccacgactgcgcggacggctcggacgagaaagactgcaccccccgctgtgacatggaccagttccagtgcaagagcggccactgcatccccctgcgctggcgctgtgacgcagacgccgactgcatggacggcagcgacgaggaggcctgcggcactggcgtgcggacctgccccctggacgagttccagtgcaacaacaccttgtgcaagccgctggcctggaagtgcgatggcgaggatgactgtggggacaactcagatgagaaccccgaggagtgtgcccggttcgtgtgccctcccaaccggcccttccgttgcaagaatgaccgcgtctgtctgtggatcgggcgccaatgcgatggcacggacaactgtggggatgggactgatgaagaggactgtgagccccccacagcccacaccacccactgcaaagacaagaaggagtttctgtgccggaaccagcgctgcctctcctcctccctgcgctgcaacatgttcgatgactgcggggacggctctgacgaggaggactgcagcatcgaccccaagctgaccagctgcgccaccaatgccagcatctgtggggacgaggcacgctgcgtgcgcaccgagaaagcggcctactgtgcctgccgctcgggcttccacaccgtgcccggccagcccggatgccaagacatcaacgagtgcctgcgcttcggcacctgctcccagctctgcaacaacaccaagggcggccacctctgcagctgcgctcggaacttcatgaagacgcacaacacctgcaaggccgaaggctctgagtaccaggtcctgtacatcgctgatgacaatgagatccgcagcctgttccccggccacccccattcggcttacgagcaggcattccagggtgacgagagtgtccgcattgatgctatggatgtccatgtcaaggctggccgtgtctattggaccaactggcacacgggcaccatctcctaccgcagcctgccacctgctgcgcctcctaccacttccaaccgccaccggcgacagattgaccggggtgtcacccacctcaacatttcagggctgaagatgcccagaggcatcgccatcgactgggtggccggaaacgtgtactggaccgactcgggccgagatgtgattgaggtggcgcagatgaagggcgagaaccgcaagacgctcatctcgggcatgattgacgagccccacgccattgtggtggacccactgagggggaccatgtactggtcagactggggcaaccaccccaagattgagacggcagcgatggatgggacgcttcgggagacactggtgcaggacaacattcagtggcccacaggcctggccgtggattatcacaatgagcggctgtactgggcagacgccaagctttcagtcatcggcagcatccggctcaatggcacggaccccattgtggctgctgacagcaaacgaggcctaagtcaccccttcagcatcgacgtctttgaggattacatctatggtgtcacctacatcaataatcgtgtcttcaagatccataagtttggccacagccccttggtcaacctgacagggggcctgagccacgcctctgacgtggtcctttaccatcagcacaagcagcccgaagtgaccaacccatgtgaccgcaagaaatgcgagtggctctgcctgctgagccccagtgggcctgtctgcacctgtcccaatgggaagcggctggacaacggcacatgcgtgcctgtgccctctccaacgccccccccagatgctccccggcctggaacctgtaacctgcagtgcttcaacggtggcagctgtttcctcaatgcacggaggcagcccaagtgccgctgccaaccccgctacacgggtgacaagtgtgaactggaccagtgctgggagcactgtcgcaatgggggcacctgtgctgcctccccctctggcatgcccacgtgccggtgccccacgggcttcacgggccccaaatgcacccagcaggtgtgtgcgggctactgtgccaacaacagcacctgcactgtcaaccagggcaaccagccccagtgccgatgcctacccggcttcctgggcgaccgctgccagtaccggcagtgctctggctactgtgagaactttggcacatgccagatggctgctgatggctcccgacaatgccgctgcactgcctactttgagggatcgaggtgtgaggtgaacaagtgcagccgctgtctcgaaggggcctgtgtggtcaacaagcagagtggggatgtcacctgcaactgcacggatggccgggtggcccccagctgtctgacctgcgtcggccactgcagcaatggcggctcctgtaccatgaacagcaaaatgatgcctgagtgccagtgcccaccccacatgacagggccccggtgtgaggagcacgtcttcagccagcagcagccaggacatatagcctccatcctaatccctctgctgttgctgctgctgctggttctggtggccggagtggtattctggtataagcggcgagtccaaggggctaagggcttccagcaccaacggatgaccaacggggccatgaacgtggagattggaaaccccacctacaagatgtacgaaggcggagagcctgatgatgtgggaggcctactggacgctgactttgccctggaccctgacaagcccaccaacttcaccaaccccgtgtatgccacactctacatggggggccatggcagtcgccactccctggccagcacggacgagaagcgagaactcctgggccggggccctgaggacgagataggggaccccttggcatagggccctgccccgtcggactgcccccagaaagcctcctgccccctgccggtgaagtccttcagtgagcccctccccagccagcccttccctggccccgccggatgtataaatgtaaaaatgaaggaattacattttatatgtgagcgagcaagccggcaagcgagcacagtattatttctccatcccctccctgcctgctccttggcacccccatgctgccttcagggagacaggcagggagggcttggggctgcacctcctaccctcccaccagaacgcaccccactgggagagctggtggtgcagccttcccctccctgtataagacactttgccaaggctctcccctctcgccccatccctgcttgcccgctcccacagcttcctgagggctaattctgggaagggagagttctttgctgcccctgtctggaagacgtggctctgggtgaggtaggcgggaaaggatggagtgttttagttcttgggggaggccaccccaaaccccagccccaactccaggggcacctatgagatggccatgctcaacccccctcccagacaggccctccctgtctccagggcccccaccgaggttcccagggctggagacttcctctggtaaacattcctccagcctcccctcccctggggacgccaaggaggtgggccacacccaggaagggaaagcgggcagccccgttttggggacgtgaacgttttaataatttttgctgaattctttacaactaaataacacagatattcttataaataaaattgtaaaaaaaaaaa

SEQ ID NO: 207 - DNA, 3432 bp, Homo sapiens
actccagcgcgcggctacctacgcttggtgcttgctttctccagccatcggagaccagagccgccccctctgctcgagaaaggggctcagcggcggcggaagcggagggggaccaccgtggagagcgcggtcccagcccggccactgcggatccctgaaaccaaaaagctcctgctgcttctgtaccccgcctgtccctcccagctgcgcagggccccttcgtgggatcatcagcccgaagacagggatggagaggcctctgtgctcccacctctgcagctgcctggctatgctggccctcctgtcccccctgagcctggcacagtatgacagctggccccattaccccgagtacttccagcaaccggctcctgagtatcaccagccccaggcccccgccaacgtggccaagattcagctgcgcctggctgggcagaagaggaagcacagcgagggccgggtggaggtgtactatgatggccagtggggcaccgtgtgcgatgacgacttctccatccacgctgcccacgtcgtctgccgggagctgggctatgtggaggccaagtcctggactgccagctcctcctacggcaagggagaagggcccatctggttagacaatctccactgtactggcaacgaggcgacccttgcagcatgcacctccaatggctggggcgtcactgactgcaagcacacggaggatgtcggtgtggtgtgcagcgacaaaaggattcctgggttcaaatttgacaattcgttgatcaaccagatagagaacctgaatatccaggtggaggacattcggattcgagccatcctctcaacctaccgcaagcgcaccccagtgatggagggctacgtggaggtgaaggagggcaagacctggaagcagatctgtgacaagcactggacggccaagaattcccgcgtggtctgcggcatgtttggcttccctggggagaggacatacaataccaaagtgtacaaaatgtttgcctcacggaggaagcagcgctactggccattctccatggactgcaccggcacagaggcccacatctccagctgcaagctgggcccccaggtgtcactggaccccatgaagaatgtcacctgcgagaatgggctgccggccgtggtgagttgtgtgcctgggcaggtcttcagccctgacggaccctcgagattccggaaagcatacaagccagagcaacccctggtgcgactgagaggcggtgcctacatcggggagggccgcgtggaggtgctcaaaaatggagaatgggggaccgtctgcgacgacaagtgggacctggtgtcggccagtgtggtctgcagagagctgggctttgggagtgccaaagaggcagtcactggctcccgactggggcaagggatcggacccatccacctcaacgagatccagtgcacaggcaatgagaagtccattatagactgcaagttcaatgccgagtctcagggctgcaaccacgaggaggatgctggtgtgagatgcaacacccctgccatgggcttgcagaagaagctgcgcctgaacggcggccgcaatccctacgagggccgagtggaggtgctggtggagagaaacgggtcccttgtgtgggggatggtgtgtggccaaaactggggcatcgtggaggccatggtggtctgccgccagctgggcctgggattcgccagcaacgccttccaggagacctggtattggcacggagatgtcaacagcaacaaagtggtcatgagtggagtgaagtgctcgggaacggagctgtccctggcgcactgccgccacgacggggaggacgtggcctgcccccagggcggagtgcagtacggggccggagttgcctgctcagaaaccgcccctgacctggtcctcaatgcggagatggtgcagcagaccacctacctggaggaccggcccatgttcatgctgcagtgtgccatggaggagaactgcctctcggcctcagccgcgcagaccgaccccaccacgggctaccgccggctcctgcgcttctcctcccagatccacaacaatggccagtccgacttccggcccaagaacggccgccacgcgtggatctggcacgactgtcacaggcactaccacagcatggaggtgttcacccactatgacctgctgaacctcaatggcaccaaggtggcagagggccacaaggccagcttctgcttggaggacacagaatgtgaaggagacatccagaagaattacgagtgtgccaacttcggcgatcagggcatcaccatgggctgctgggacatgtaccgccatgacatcgactgccagtgggttgacatcactgacgtgccccctggagactacctgttccaggttgttattaaccccaacttcgaggttgcagaatccgattactccaacaacatcatgaaatgcaggagccgctatgacggccaccgcatctggatgtacaactgccacataggtggttccttcagcgaagagacggaaaaaaagtttgagcacttcagcgggctcttaaacaaccagctgtccccgcagtaaagaagcctgcgtggtcaactcctgtcttcaggccacaccacatcttccatgggacttccccccaacaactgagtctgaacgaatgccacgtgccctcacccagcccggcccccaccctgtccagacccctacagctgtgtctaagctcaggaggaaagggaccctcccatcattcatggggggctgctacctgacccttggggcctgagaaggccttgggggggtggggtttgtccacagagctgctggagcagcaccaagagccagtcttgaccgggatgaggcccacagacaggttgtcatcagcttgtcccattcaagccaccgagctcaccacagacacagtggagccgcgctcttctccagtgacacgtggacaaatgcgggctcatcagcccccccagagagggtcaggccgaaccccatttctcctcctcttaggtcattttcagcaaacttgaatatctagacctctcttccaatgaaaccctccagtctattatagtcacatagataatggtgccacgtgttttctgatttggtgagctcagacttggtgcttccctctccacaacccccaccccttgtttttcaagatactattattatattttcacagacttttgaagcacaaatttattggcatttaatattggacatctgggcccttggaagtacaaatctaaggaaaaaccaacccactgtgtaagtgactcatcttcctgttgttccaattctgtgggtttttgattcaacggtgctataaccagggtcctgggtgacagggcgctcactgagcaccatgtgtcatcacagacacttacacatacttgaaacttggaataaaagaaagatttatg

SEQ ID NO: 208 - DNA, 4530 bp, Homo sapiens
aattctcgagctcgtcgaccggtcgacgagctcgagggtcgacgagctcgagggcgcgcgcccggcccccacccctcgcagcaccccgcgccccgcgccctcccagccgggtccagccggagccatggggccggagccgcagtgagcaccatggagctggcggccttgtgccgctgggggctcctcctcgccctcttgccccccggagccgcgagcacccaagtgtgcaccggcacagacatgaagctgcggctccctgccagtcccgagacccacctggacatgctccgccacctctaccagggctgccaggtggtgcagggaaacctggaactcacctacctgcccaccaatgccagcctgtccttcctgcaggatatccaggaggtgcagggctacgtgctcatcgctcacaaccaagtgaggcaggtcccactgcagaggctgcggattgtgcgaggcacccagctctttgaggacaactatgccctggccgtgctagacaatggagacccgctgaacaataccacccctgtcacaggggcctccccaggaggcctgcgggagctgcagcttcgaagcctcacagagatcttgaaaggaggggtcttgatccagcggaacccccagctctgctaccaggacacgattttgtggaaggacatcttccacaagaacaaccagctggctctcacactgatagacaccaaccgctctcgggcctgccacccctgttctccgatgtgtaagggctcccgctgctggggagagagttctgaggattgtcagagcctgacgcgcactgtctgtgccggtggctgtgcccgctgcaaggggccactgcccactgactgctgccatgagcagtgtgctgccggctgcacgggccccaagcactctgactgcctggcctgcctccacttcaaccacagtggcatctgtgagctgcactgcccagccctggtcacctacaacacagacacgtttgagtccatgcccaatcccgagggccggtatacattcggcgccagctgtgtgactgcctgtccctacaactacctttctacggacgtgggatcctgcaccctcgtctgccccctgcacaaccaagaggtgacagcagaggatggaacacagcggtgtgagaagtgcagcaagccctgtgcccgagtgtgctatggtctgggcatggagcacttgcgagaggtgagggcagttaccagtgccaatatccaggagtttgctggctgcaagaagatctttgggagcctggcatttctgccggagagctttgatggggacccagcctccaacactgccccgctccagccagagcagctccaagtgtttgagactctggaagagatcacaggttacctatacatctcagcatggccggacagcctgcctgacctcagcgtcttccagaacctgcaagtaatccggggacgaattctgcacaatggcgcctactcgctgaccctgcaagggctgggcatcagctggctggggctgcgctcactgagggaactgggcagtggactggccctcatccaccataacacccacctctgcttcgtgcacacggtgccctgggaccagctctttcggaacccgcaccaagctctgctccacactgccaaccggccagaggacgagtgtgtgggcgagggcctggcctgccaccagctgtgcgcccgagggcactgctggggtccagggcccacccagtgtgtcaactgcagccagttccttcggggccaggagtgcgtggaggaatgccgagtactgcaggggctccccagggagtatgtgaatgccaggcactgtttgccgtgccaccctgagtgtcagccccagaatggctcagtgacctgttttggaccggaggctgaccagtgtgtggcctgtgcccactataaggaccctcccttctgcgtggcccgctgccccagcggtgtgaaacctgacctctcctacatgcccatctggaagtttccagatgaggagggcgcatgccagccttgccccatcaactgcacccactcctgtgtggacctggatgacaagggctgccccgccgagcagagagccagccctctgacgtccatcgtctctgcggtggttggcattctgctggtcgtggtcttgggggtggtctttgggatcctcatcaagcgacggcagcagaagatccggaagtacacgatgcggagactgctgcaggaaacggagctggtggagccgctgacacctagcggagcgatgcccaaccaggcgcagatgcggatcctgaaagagacggagctgaggaaggtgaaggtgcttggatctggcgcttttggcacagtctacaagggcatctggatccctgatggggagaatgtgaaaattccagtggccatcaaagtgttgagggaaaacacatcccccaaagccaacaaagaaatcttagacgaagcatacgtgatggctggtgtgggctccccatatgtctcccgccttctgggcatctgcctgacatccacggtgcagctggtgacacagcttatgccctatggctgcctcttagaccatgtccgggaaaaccgcggacgcctgggctcccaggacctgctgaactggtgtatgcagattgccaaggggatgagctacctggaggatgtgcggctcgtacacagggacttggccgctcggaacgtgctggtcaagagtcccaaccatgtcaaaattacagacttcgggctggctcggctgctggacattgacgagacagagtaccatgcagatgggggcaaggtgcccatcaagtggatggcgctggagtccattctccgccggcggttcacccaccagagtgatgtgtggagttatggtgtgactgtgtgggagctgatgacttttggggccaaaccttacgatgggatcccagcccgggagatccctgacctgctggaaaagggggagcggctgccccagccccccatctgcaccattgatgtctacatgatcatggtcaaatgttggatgattgactctgaatgtcggccaagattccgggagttggtgtctgaattctcccgcatggccagggacccccagcgctttgtggtcatccagaatgaggacttgggcccagccagtcccttggacagcaccttctaccgctcactgctggaggacgatgacatgggggacctggtggatgctgaggagtatctggtaccccagcagggcttcttctgtccagaccctgccccgggcgctgggggcatggtccaccacaggcaccgcagctcatctaccaggagtggcggtggggacctgacactagggctggagccctctgaagaggaggcccccaggtctccactggcaccctccgaaggggctggctccgatgtatttgatggtgacctgggaatgggggcagccaaggggctgcaaagcctccccacacatgaccccagccctctacagcggtacagtgaggaccccacagtacccctgccctctgagactgatggctacgttgcccccctgacctgcagcccccagcctgaatatgtgaaccagccagatgttcggccccagcccccttcgccccgagagggccctctgcctgctgcccgacctgctggtgccactctggaaagggccaagactctctccccagggaagaatggggtcgtcaaagacgtttttgcctttgggggtgccgtggagaaccccgagtacttgacaccccagggaggagctgcccctcagccccaccctcctcctgccttcagcccagccttcgacaacctctattactgggaccaggacccaccagagcggggggctccacccagcaccttcaaagggacacctacggcagagaacccagagtacctgggtctggacgtgccagtgtgaaccagaaggccaagtccgcagaagccctgatgtgtcctcagggagcagggaaggcctgacttctgctggcatcaagaggtgggagggccctccgaccacttccaggggaacctgccatgccaggaacctgtcctaaggaaccttccttcctgcttgagttcccagatggctggaaggggtccagcctcgttggaagaggaacagcactggggagtctttgtggattctgaggccctgcccaatgagactctagggtccagtggatgccacagcccagcttggccctttccttccagatcctgggtactgaaagccttagggaagctggcctgagaggggaagcggccctaagggagtgtctaagaacaaaagcgacccattcagagactgtccctgaaacctagtactgccccccatgaggaaggaacagcaatggtgtcagtatccaggctttgtacagagtgcttttctgtttagtttttactttttttgttttgtttttttaaagacgaaataaagacccaggggagaatgggtgttgtatggggaggcaagtgtggggggtccttctccacacccactttgtccatttgcaaatatattttggaaaac

SEQ ID NO: 209 - DNA, 3238 bp, Homo sapiens
atgagctacacgttggactcgctgggcaacccgtccgcctaccggcgggtaaccgagacccgctcgagcttcagccgcgtcagcggctccccgtccagtggcttccgctcgcagtcgtggtcccgcggctcgcccagcaccgtgtcctcctcctataagcgcagcatgctcgccccgcgcctcgcttacagctcggccatgctcagctccgccgagagcagccttgacttcagccagtcctcgtccctgctcaacggcggctccggacccggcggcgactacaagctgtcccgctccaacgagaaggagcagctgcaggggctgaacgaccgctttgccggctacatagagaaggtgcactacctggagcagcagaataaggagattgaggcggagatccaggcgctgcggcagaagcaggcctcgcacgcccagctgggcgacgcgtacgaccaggagatccgcgagctgcgcgccaccctggagatggtgaaccacgagaaggctcaggtgcagctggactcggaccacctggaggaagacatccaccggctcaaggagcgctttgaggaggaggcgcggttgcgggacgacactgaggcggccatccgggcgctgcgcaaagacatcgaggaggcgtcgctggtcaaggtggagctggacaagaaggtgcagtcgctgcaggatgaggtggccttcctgcggagcaaccacgaggaggaggtggccgaccttctggcccagatccaggcatcgcacatcacggtggagcgcaaagactacctgaagacagacatctcgacggcgctgaaggaaatccgctcccagctcgaaagccactcagaccagaatatgcaccaggccgaagagtggttcaaatgccgctacgccaagctcaccgaggcggccgagcagaacaaggaggccatccgctccgccaaggaagagatcgccgagtaccggcgccagctgcagtccaagagcatcgagctagagtcggtgcgcggcaccaaggagtccctggagcggcagctcagcgacatcgaggagcgccacaaccacgacctcagcagctaccaggacaccatccagcagctggaaaatgagcttcggggcacaaagtgggaaatggctcgtcatttgcgcgaataccaggacctcctcaacgtcaagatggctctggatatagaaatcgctgcgtacagaaaactcctggagggtgaagagactagatttagcacatttgcaggaagcatcactgggccactgtatacacaccgacccccaatcacaatatccagtaagattcagaaaaccaaggtggaagctcccaagcttaaggtccaacacaaatttgtcgaggagatcatagaggaaaccaaagtggaggatgagaagtcagaaatggaagaggccctgacagccattacagaggaattggccgcttccatgaaggaagagaagaaagaagcagcagaagaaaaggaagaggaacccgaagctgaagaagaagaagtagctgccaaaaagtctccagtgaaagcaactgcacctgaagttaaagaagaggaaggggaaaaggaggaagaagaaggccaggaagaagaggaggaagaagatgagggagctaagtcagaccaagccgaagagggaggatccgagaaggaaggctctagtgaaaaagaggaaggtgagcaggaagaaggagaaacagaagctgaagctgaaggagaggaagccgaagctaaagaggaaaagaaagtggaggaaaagagtgaggaagtggctaccaaggaggagctggtggcagatgccaaggtggaaaagccagaaaaagccaagtctcctgtgccaaaatcaccagtggaagagaaaggcaagtctcctgtgcccaagtcaccagtggaagagaaaggcaagtctcctgtgcccaagtcaccagtggaagagaaaggcaagtctcctgtgccgaaatcaccagtggaagagaaaggcaagtctcctgtgtcaaaatcaccagtggaagagaaagccaaatctcctgtgccaaaatcaccagtggaagaggcaaagtcaaaagcagaagtggggaaaggtgaacagaaagaggaagaagaaaaggaagtcaaggaagctcccaaggaagagaaggtagagaaaaaggaagagaaaccaaaggatgtgccagagaagaagaaagctgagtcccctgtaaaggaggaagctgtggcagaggtggtcaccatcaccaaatcggtaaaggtgcacttggagaaagagaccaaagaagaggggaagccactgcagcaggagaaagagaaggagaaagcgggaggagagggaggaagtgaggaggaagggagtgataaaggtgccaagggatccaggaaggaagacatagctgtcaatggggaggtagaaggaaaagaggaggtagagcaggagaccaaggaaaaaggcagtgggagggaagaggagaaaggcgttgtcaccaatggcctagacttgagcccagcagatgaaaagaaggggggtgataaaagtgaggagaaagtggtggtgaccaaaacggtagaaaaaatcaccagtgaggggggagatggtgctaccaaatacatcactaaatctgtaaccgtcactcaaaaggttgaagagcatgaagagacctttgaggagaaactagtgtctactaaaaaggtagaaaaagtcacttcacacgccatagtaaaggaagtcacccagagtgactaagatttgagtccattgcaaaaggttaagccatatgacaatttcaaaatgcatgtgattggcagcttcaaaacagaacgggttctcccatgggggctccagacattgtattttactttgtgcaatatgaggggactgcatgcaagctcagggtgctccctcctcagtctttgggggattcaaatgcatgatattgtatgtacctgggaaatttgccgatttcctaagctgttggaagggggtcacttaaggggggatgtcttgagatgtattatgcaaagtaccaactgagccaaaaacaataaatgaaacacagaactcagccttaagaaagctatatatgaataattatgtttacctcactggtgcatttaaaatggacttttgttcatgggagaacctcgttgacatgcacagtttgcaatcttatgttgatcgatgttaaacgtcacagcagtacttgctcaataaaggtcatattggaaacata

SEQ ID NO: 210 - DNA, 1086 bp, Homo sapiens
gggcgggcccgcacccctgcgaacatggcgctgcgagtggtgcggagcgtgcgggccctgctctgcaccctgcgcgcggtcccgttacccgccgcgccctgcccgccgaggccctggcagctgggggtgggcgccgtccgtacgctgcgcactggacccgctctgctctcggtgcgtaaattcacagagaaacacgaatgggtaacaacagaaaatggcattggaacagtgggaatcagcaattttgcacaggaagcgttgggagatgttgtttattgtagtctccctgaagttgggacaaaattgaacaaacaagatgagtttggtgctttggaaagtgtgaaagctgctagtgaactctattctcctttatcaggagaagtaactgaaattaatgaagctcttgcagaaaatccaggacttgtaaacaaatcttgttatgaagatggttggctgatcaagatgacactgagtaacccttcagaactagatgaacttatgagtgaagaagcatatgagaaatacataaaatctattgaggagtgaaaatggaactcctaaataaactagtatgaaataacgcaagccagcagagttgtcttaaattagtggtggatagaagacttagaatagaaacttttagtattaccgatggggaaaaaaaaactactgttaacactgctaatgaaagaaaatgccctttaactttctaatgattatagataaatataatatgcgtctttttcacaatatcctatgatttttagactaggctctagtgttcagaattcatgaaattatccatggtaaaaactagttataaaaattacataattcaaagataacattgttattcttaagccttatataatattgtaacttgcatgtatccatacctggatttgggatgaaatacttaatgatctttccattggaaataactggaagtgaagaggttttgttgcttgtacagtgtcagatgaggaacaccactatcttaattttgcgatacactgcatttgctggtgctatttttatacagtgaagcaacagctttgcagcaaaataataaaatacttcttcgtt

SEQ ID NO: 211 - DNA, 3410 bp, Homo sapiens
tgcgacgtgactggctagctgcgtgggtactggaacaagcaaacgaggcagcgagcgaaggacgggagccggaccctgggccccgtggaactccagcctgcgccaccacgtcacgcacacgctcggcgctgcgatccgcgcatataacgatatttggatttgacctgcattttggaatttatctacacttaaaatgccaccagcagttggaggtccagttggatacacccccccagatggaggctggggctgggcagtggtaattggagctttcatttccatcggcttctcttatgcatttcccaaatcaattactgtcttcttcaaagagattgaaggtatattccatgccaccaccagcgaagtgtcatggatatcctccataatgttggctgtcatgtatggtggaggtcctatcagcagtatcctggtgaataaatatggaagtcgtatagtcatgattgttggtggctgcttgtcaggctgtggcttgattgcagcttctttctgtaacaccgtacagcaactatacgtctgtattggagtcattggaggtcttgggcttgccttcaacttgaatccagctctgaccatgattggcaagtatttctacaagaggcgaccattggccaacggactggccatggcaggcagccctgtgttcctctgtactctggcccccctcaatcaggttttcttcggtatctttggatggagaggaagctttctaattcttgggggcttgctactaaactgctgtgttgctggagccctcatgcgaccaatcgggcccaagccaaccaaggcagggaaagataagtctaaagcatcccttgagaaagctggaaaatctggtgtgaaaaaagatctgcatgatgcaaatacagatcttattggaagacaccctaaacaagagaaacgatcagtcttccaaacaattaatcagttcctggacttaaccctattcacccacagaggctttttgctatacctctctggaaatgtgatcatgttttttggactctttgcacctttggtgtttcttagtagttatgggaagagtcagcattattctagtgagaagtctgccttccttctttccattctggcttttgttgacatggtagcccgaccatctatgggacttgtagccaacacaaagccaataagacctcgaattcagtatttctttgcggcttccgttgttgcaaatggagtgtgtcatatgctagcacctttatccactacctatgttggattctgtgtctatgcgggattctttggatttgccttcgggtggctcagctccgtattgtttgaaacattgatggaccttgttggaccccagaggttctccagcgctgtgggattggtgaccattgtggaatgctgtcctgtcctcctggggccaccacttttaggtcggctcaatgacatgtatggagactacaaatacacatactgggcatgtggcgtcgtcctaattatttcaggtatctatctcttcattggcatgggcatcaattatcgacttttggcaaaagaacagaaagcaaacgagcagaaaaaggaaagtaaagaggaagagaccagtatagatgttgctgggaagccaaatgaagttaccaaagcagcagaatctccggaccagaaagacacagaaggagggcccaaggaggaggaaagtccagtctgaatccatggggctgaagggtaaattgagcagttcatgacccaggatatctgaaaatattctactggcctgtaatctaccagtggtgctcaatgcaaatagtagacatttgtgtggaaatcataccagttgttcattgatgggatttttgtttgactccttaccaatagcctgaatttgaggagggaatgattggtagcaaaggatgggggaaagaagtaggttctgttttgttttgttttaatcttagcttttaatagtgtcataaagattataatatgtgccttaagttttagtctttagaactctagagagccttaacttcttaaaccatttttgctgaattcatctatttcgagtgttgtgttaaaaggaaaaataacaactaacttgtttgaggcaaatctaaaatttaaaattaatcttgcttcattgttacatgtaatatatttcagacattttcactggaagatttatgaacagaaatattggttgaaagttagagattttacaaaatgctgacaaaaatattttcctagcatcagtagatttctggcatatgtttctgctagctatatatttaggaaattcaaagcataaaactttggcaacatcttggctgttctagacacagtgtacttgtcaacccctctcaggtaccttttcttgggatgcttattagaagccaagtaaagtgcttaaggtttgttttcattaaattagctatttctgctcccctgttcaaagatgcattttgagtgtttatagatcactgccctttttgaaatcacctggtattatttttcttactggaaaagttagtattaaaatctacagaactacatatttgtgcctccttggtaaatacaacacatctaattaaatgtagacagatatttcaaacatcagctgaattcacttaagtttttccaaaacctcagttaaactgtgaagctattggaatttttttttcctggaatttttcccctttgattcacagtggtcccatttatatctgcttctagcttagtgctatgtgtgagatatgtgtgtgtttggtgtttttgtttttttgtttttttttttttaaggtttgcaaattaaaaagggccagaaaaatttggcaccaggcaaacgaataaagataggattgggaaagaagttgctaagtgtgcttagttttaataagtaattccttctcttttttcagagaaggccttacagaaaattgttgtgcttagaattgctggatgcatttttaccctccacacaaacctaaaaattttgtgacccctttcacttacctgaaaagtagagaaatggattcagtataaggataaggagggaaggtggaccagaatgaaaactgtaaatatttttttaacctaatatcacttaaatcgaggcagaaagatatagacattcaatgaattatattcaatgcatttaaaataccactgtaattgacagagtaaaagtatagatacaaaaccttgtgtaagaggctgacttttccaaataaacattttttaagaaaacatttcttctcccaaatgtctattttcttgaggaaaatattgctgtgtcttcattttcattaccaggtttcattttgggccttgctaaattgattgaattaaatcctccagcttttgaaccttgaaaaaaaaaaaaaaaaaaaaaaaaaaaaaaaaaaaagaaaaaaaaaaaaaaaaag

SEQ ID NO: 212 - DNA, 9909 bp, Homo sapiens
agggaaacttggaggctgcgaccagggtttggcgttgttgtcagcctcggggagagagattggacaaatattctccaagaggaggagggcgacgccaaggactttccacatcaactgctttggggtatctccacaagttggaagagggaccctttcgttttgcattgcgtgtgttgtgctcattaccagtgcagcgactgccgtcccagggtgactctgagttgtcctttatcgtgagctagcaatggctagcgaagacaatcgtgtcccttccccgccaccaacaggtgatgacgggggaggtggagggagagaagaaacccctactgaagggggtgcattgtctctgaaaccagggctccccatcaggggcatcagaatgaaatttgccgtgttgaccggtttggttgaagttggagaagtatccaatagggatattgtagaaactgtctttaacctgttggtaggaggacagtttgatctggaaatgaatttcattatccaagaaggtgagagtattaactgcatggtggacctactggaaaaatgtgacattacgtgccaagcagaagtctggagcatgtttacagccattctgaagaaaagcatacggaatcttcaagtctgcactgaagtaggccttgttgaaaaagtgcttgggaaaattgaaaaagttgacaatatgatagcagatcttttggttgacatgttgggagtgctggctagctataatttgacagttcgcgagctaaagcttttcttcagtaaacttcaaggagataaaggacgatggcctccacatgctgggaagttgctgtctgtgttaaagcatatgcctcagaagtatggtcctgatgccttttttaactttccaggaaagagtgctgcagctattgcattacctcctatagccaaatggccataccagaatggttttacatttcatacatggcttagaatggatcctgtaaataacatcaatgtagataaggataaaccatatttgtattgtttcagaaccagcaaaggtcttggctattctgctcattttgttggaggctgtttgattgtaacatcaataaagtcaaaaggaaaaggctttcaacactgtgtgaaatttgatttcaagccacaaaagtggtatatggttaccatagtacacatctataaccgatggaagaatagtgaacttcgatgttatgtgaatggtgagctggcttcctatggagagataacatggtttgtcaacactagcgatacctttgacaaatgtttcctgggctcatcagaaacagcagatgctaatagagtattctgtggtcagatgactgcagtttaccttttcagtgaagctctaaatgcagctcagatatttgctatttatcagttgggcctgggatacaagggtacatttaaattcaaagcagaaagcgaccttttccttgctgagcatcacaaacttttattgtacgatgggaaactctctagtgccattgcattcacgtacaatccacgggctacagatgcccagctttgtcttgaatcatctcctaaggacaacccttcaatttttgttcattcaccacatgcactcatgctccaggatgtaaaggcagttttaacacattccatccaaagtgcaatgcattcaattggaggagtacaagtactatttccactttttgcacagttggattacaggcaatatttgtctgatgagattgatttgactatatgttcaaccttgctggcctttatcatggaattgttgaagaactcaattgctatgcaggaacagatgcttgcctgtaagggcttcttggtaataggatatagccttgaaaagtcttccaaatctcatgttagcagagcagtacttgaactttgccttgcattttcaaaatatctgagtaatctgcagaatgggatgcccctgctcaagcaattgtgtgatcacgttcttcttaatcctgccatatggattcataccccagccaaggttcaactgatgctctatacttatctgtccacggaattcattggtacagtcaacatatataacaccattcggagagttggaacagtgcttctcatcatgcacacgctgaagtactactactgggcagtgaatcctcaggatcgaagtggtatcaccccaaaaggattagatggaccgcgacctaatcaaaaagaaatgctttctctacgagcattcttgttgatgttcattaagcaattagtgatgaaggattctggagtaaaggaagatgaattacaggccattcttaattacctactgactatgcatgaggatgacaatctaatggatgtcctacagctgcttgttgcattaatgtcagaacaccctaactctatgattcctgcttttgaccaaaggaatgggttacgtgttatctacaaacttctggcatcgaaaagtgaaggaatcagggtacaagctcttaaggcaatgggttattttttaaaacatcggcccccaaagaggaaagcagaagtcatgcttggacatggattgttttcattgctagctgaaaggctcatgcttcagacaaatttaatcacaatgaccacatataatgtgctgtttgagattcttatagaacagattggtactcaggtgatacataaacagcatccagatcctgattcttcagtgaagatacaaaaccctcagatactaaaagtaattgcgaccctacttcgaaattctccccagtgcccagagagcatggaggttcgcagagcctttctttctgacatgattaaactttttaataacagtagagaaaacaggaggagcttgctacaatgctctgtgtggcaagaatggatgctttctctctgctattttaatcctaagaattcagatgagcaaaagataacagaaatggtatacgccatattcagaatcctgctttaccatgcagtcaaatatgagtggggtggctggcgtgtatgggtagacactttatcaatcactcattcaaaggtcacttttgaaatacacaaagaaaaccttgccaatatatttagggaacagcaaggaaaagttgatgaagaaatagggctgtgttcttcaacttcagttcaagcagcctctggcattagaagggatattaatgtttcagtaggatcccagcaaccagatacgaaggattctcctgtctgtcctcatttcaccacaaatggtaatgaaaattcaagtatagagaagacaagttcactagaatctgcatctaatattgaactgcaaactactaatacatcttatgaagaaatgaaagctgagcaagaaaatcaggagttaccagatgaaggcactttggaagaaacactgacaaatgagacaaggaatgcagatgatttagaagtatcttctgacataatagaagctgtggctatttcctctaattcttttataacaactggcaaagattcaatgactgtcagtgaagtaactgcttctataagttctccttcagaagaggatgcctcagagatgccagaattcttggataaatctatagtagaggaagaggaagatgatgattatgtggaactgaaagtagaaggcagtcctactgaggaagctaatctacccacagagctccaagataacagtttgtctccagctgcatctgaagccggtgaaaaactggacatgtttggtaatgatgacaaattaatatttcaagaaggaaaacctgttactgaaaagcaaactgatactgaaactcaagattctaaagattctggaattcagactatgacagcatcagggtcttcagctatgtcaccagaaactactgtttcccaaatagctgtagaatcagaccttggtcagatgctggaggaagggaagaaagcaactaacctcactagagaaaccaaattaattaatgattgtcatggtagtgtctctgaggcttcttctgagcaaaagattgcgaagttggatgtttccaatgttgctacagatactgagaggctggagttgaaggccagtcccaacgtggaagcacctcaacctcatcgacatgtgcttgagatatcaaggcaacatgagcagccagggcaaggaatagcaccagatgcagttaatggacaaaggagggattccagatctactgtgtttcgtattcctgagttcaactggtctcagatgcatcaacgtttgctcactgatctattattttcaatagaaacagatatacagatgtggagaagccattcaacaaagacagttatggacttcgtgaatagcagtgataatgtcatctttgtacacaacacaattcatctcatctctcaagtgatggacaatatggtcatggcttgtgggggtatactgccattgctttcagctgctacatcggctacacatgaactggaaaatattgaacctactcaaggcctttcaatagaagcctctgtgacatttttgcagaggctaattagccttgtggatgtgcttatatttgcaagttctcttggctttactgaaattgaagctgaaaaaagtatgtcatctggaggaattttgcggcagtgtctccgactagtttgtgcagtcgcagtaaggaattgcttggagtgtcaacagcattcacaactgaaaactaggggagataaagccttgaaaccaatgcatagccttattcctttagggaaatctgcagcgaagagcccagtggacattgtgactggcggtatatctccagtaagagatcttgacaggcttctacaggacatggatattaatcggcttagggcagttgttttcagagacatagaggatagcaaacaagctcaatttttagccttggcagtagtatactttatctctgttcttatggtctccaagtacagagacattttggaaccccaaaatgaaaggcatagccagtcatgtacagaaactggcagtgaaaatgagaatgtatcactctctgaaatcacaccagcagcattcagcactttaactacggcatcagtggaagaatctgaaagcacatcatctgctcgaaggagggactcaggcattggggaagaaacagccactggtttaggaagccatgtggaagtaactcctcacacagcacctcctggtgtcagtgcaggcccagatgcaatcagcgaggtgctatctactctttctttagaagtcaataagtctccggaaaccaaaaatgatagaggaaatgacttggacactaaggctacaccgtcagtttcagtttcaaaaaacgtcaatgtgaaagacattctccgaagcttggttaacataccagcagatggagtcacagtggatcctgcccttctgccaccagcctgccttggagcccttggtgatctatctgtggaacaacccgtgcagttcagatcttttgacagaagtgtcattgttgcagcaaaaaagtcagcagtctcaccttccacctttaatacaagcatacctaccaatgctgtcagtgtggtttcctcagtagattcagcccaagcctcagatatgggaggagaatcaccaggcagtagatcatctaatgcaaaattgccctcagttccaacagttgattcagtttcacaagatccggtttcaaatatgagtattacagagaggcttgaacacgctttggaaaaggcagctcctctccttcgtgagatttttgtggattttgcaccttttctttctcggacacttttgggtagccatggacaagaactgcttatagaaggaacaagtctggtttgcatgaagtcgagtagttcagttgtggaattggttatgctactgtgttctcaggagtggcaaaattctattcagaagaatgcaggccttgcttttatcgaacttgtcaatgaaggaaggttgcttagccagacaatgaaggatcatctagtaagagtagcaaatgaagctgaatttatcctgagcaggcagagagcagaagatattcacagacatgcggaatttgagtcactgtgtgcccagtattctgcagacaaacgagaagatgagaagatgtgtgatcatttgataagagcagcaaaatatcgtgaccacgtgacagcaactcaactaatccagaaaattatcaacattctcacagacaagcatggagcctggggaaattctgcagtgagtcgtcctcttgagttctggcgccttgactactgggaagatgacttgcggcgccggcgacgatttgtgcgtaaccctctaggatcgacacatcctgaagcgacactaaaaacagccgtggaacatgtgtgcatttttaaattgagagagaacagcaaagccacagatgaagatatccttgctaaaggaaaacagtccatcaggagtcaggctttaggaaatcagaactcagaaaacgagatcctcctggaaggcgatgatgatactctgtcatccgtggatgagaaagatttagagaatcttgccggtcctgttagcctgagcacaccagctcagcttgtggccccctctgttgtagtaaagggcactctttctgtcacctcctccgaactctattttgaggtggatgaagaggatcctaacttcaaaaaaatcgaccccaagatcttggcatatacagaagggctgcatggaaaatggctgttcacagagatacgatcaatcttttctcgtcgttatcttttgcaaaatacagccctggagatctttatggcaaacagagttgctgtgatgttcaacttcccagaccctgcaacagtaaagaaagtggttaactttctacctcgtgttggcgttggaacaagttttggattgcctcaaaccagacgtatttcattagctagtccacgtcagctttttaaggcttctaatatgacccagcgatggcaacacagagagatatctaattttgagtacttgatgtttctcaacacgatagcaggacggagttataatgacttaaatcagtatccagtgtttccttgggtcatcactaattatgaatcagaagaactggatcttaccttgcccaccaacttcagagatttgtccaagccaataggagctctgaacccaaaaagagcagcattcttcgctgagcgttatgaatcatgggaagatgatcaagttccaaagtttcactatggtactcattactcaactgcaagttttgttcttgcatggctgctaagaatagaaccctttacaacttatttcctaaatttgcaaggaggcaaatttgatcatgcagatcgaactttttcatcaatttccagagcttggcgaaacagtcagcgtgatacctctgatattaaggagttgatccctgaattttattatctccctgagatgtttgtcaacttcaataattataatcttggagtgatggatgatgggacagtagtgtctgatgtcgaacttcctccttgggccaaaacctcagaagaatttgttcacataaacagattggccctggagagtgaatttgtttcctgccagcttcaccaatggattgatctcatttttggctataaacagcaaggaccagaagctgtccgagccctcaatgtgttctattacttgacctatgaaggagctgtcaatctgaattcaataactgatcctgtgttgagagaggctgttgaagctcaaatccgaagttttggacagactccttctcaactactcatagagccccatcctcccagaggttctgccatgcaagtgagtccattgatgttcacagacaaagcccagcaggatgttatcatggtcctcaagtttccctccaactcccctgttactcacgtggcagccaacacccagcctggtttggcaactcccgctgtgatcacagtcactgctaacaggttatttgcggtgaacaaatggcacaaccttccagctcatcaaggtgctgtacaagaccagccataccagctgccagtggaaatcgatcctctcatagccagcaatacaggaatgcacaggaggcaaatcactgaccttttagaccaaagtattcaagtgcattcccagtgctttgtcatcacttcagacaaccgctatattctcgtctgtggcttctgggataaaagtttcagagtctattctacagacacaggaagattgatccaagtggtgtttggccattgggatgtcgtcacttgccttgctcgttctgagtcatatattgggggaaattgctacattctctcagggtcacgtgatgcaactcttttgctgtggtattggaatggaaaatgcagtgggattggagataacccaggcagtgagactgctgctcctcgggccattttgaccggccatgactatgaggtcacatgtgctgcggtgtgtgcggagctaggcctggtgttgagtggttcacaagaaggaccatgtctcatacattccatgaatggagacttgttgaggaccttggagggtcctgaaaactgcctgaaaccaaaactcattcaggcttcaagagagggtcattgtgtcatattctatgaaaacggcctcttctgtacattcagtgtgaatggaaaactccaggccacgatggaaacagatgataacataagagccatccagctgagccgagatgggcagtacctgctcacaggaggagacagaggagtggtcgtggtccggcaggtgtcggacctcaagcagctctttgcctatccaggatgtgacgctggaatccgggccatggcgctgtcttacgaccagaggtgcatcatttctggcatggcttcaggaagcattgtgctattttacaacgactttaaccggtggcatcatgaataccaaacccgctactgatggtgacagctgtacatcaactctgcccctaggatgagcagaagtacctggagcataattctcttctaccacatctgaatgtaacttaaatttgctcaaagaagcaaaatattttttaaagttattaataattgctatttttgtagtctttgcttgacttttttgggggggattagcaaagcagaaaactggctgctgggttctgtagttttaaaaaatctatatttttagtcataatgagaagtctattttcaccaattatggaaacatacagtggagcaagtaaaccacttattccagctataatattatgaagaacatttcccatgcatctacaagcttgagaaataggattttcacagtggggaagtgggttacaatattggaataggaaaatttgatgctgtaatttgggtcctgtatttttccaaacaactgtgcttcttcagcactaatatttctgggatttaaatagtaatgtttaaattatggtaaatgtaatttaaaacatctcaattaagtctgtctatcaatattgttcttcaagcatgttttagacctagaaaagtatggtttgggggaggctattttattgtgtggttagcacaaggaatctaatttatagcaagtgtgaaatagttaccattttttcctgatctgtcatcttcatagcacaacaaaacgaaatgatggaaatgctcttgagctcacaacatttgtttttcttttaaagtaaatgcaagtaccaaagctcactactgcggtttgcctgtgcctggacaatgaggcggagccactgttgttggggcacccccttccctccccgggtttgcaaatagaggctaccgggtgctgtattcagcaacacctgttttactatttgttattaaactatcatctccaccttccttttgattagcaatttgtactaagaaacgaaacaatgttatttggtggtgtataattctacttttctagtagattactgtgtggaattctgtgaaaaatatttgagaaaaggcctgtattgcataaataaattctttgtatgttgtgaaaaaaaaaaaaaaaaa

SEQ ID NO: 213 - DNA, 1486 bp, Homo sapiens
gaattcggcacgagctcaggggctgcataggcacccagagccgaactccaagatgggaggcaagctcagcaagaagaagaagggctacaatgtgaacgacgagaaagccaaggagaaagacaagaaggccgagggcgcggcgacggaagaggaggggaccccgaaggagagtgagccccaggcgcccgcagagcccgccgaggccaaggagggcaaggagaagcccgaccaggacgccgagggcaaggccgaggagaaggagggcgagaaggacgcggcggctgccaaggaggaggccccgaaggcggagcccgagaagacggagggcgcggcagaggccaaggctgagcccccgaaggcgcccgagcaggagcaggcggcccccggcccgctgcggggcggcgaggcccccaaagctgctgaggccgccgccggcccccggccgagagcggcccctgccgccggggaggagcccagcaaggaggaaggggaacccaaaaagactgaggcgcccgcagctcctgccgcccaggagaccaaaagtgacggggccccagcttcagactcaaaacccggcagctcggaggctgccccctcttccaaggagacccccgcagccacggaagcgcctagttccacacccaaggcccagggccccgcagcctctgcagaagagcccaagccggtggaggccccggcagctaattccgaccaaaccgtaaccgtgaaagagtgacaaggacagcctataggaaaaacaataccacttaaaacaatctcctctctctctctctctctctctctatctctctctctatctcctctctctctctcctctcctatctctcctctctctctctcctatactaacttgtttcaaattggaagtaatgatatgtattgcccaaggaaaaatacaggatgttgtcccatcaagggagggagggggtgggagaatccaaatagtatttttgtggggaaatatctaatataccttcagtcaactttaccaagaagtcctggatttccaagatccgcgtctgaaagtgcagtacatcgtttgtacctgaaactgccgccacatgcactcctccaccgctgagagttgaatagcttttcttctgcaatgggagttgggagtgatgcgtttgattctgcccacagggcctgtgccaaggcaatcagatctttatgagagcagtattttctgtgttttctttttaatttacagcctttcttattttgatatttttttaatgttgtggatgaatgccagctttcagacagagcccacttagcttgtccacatggatctcaatgccaatcctccattcttcctctccagatatttttgggagtgacaaacattctctcatcctacttagcctacctagatttctcatgacgagttaatgcatgtccgtggttgggtgcacctgtagttctgtttattggtcagtggaaatgaaaaaaaaaaaaaaaaaaa

SEQ ID NO: 214 - DNA, 2470 bp, Homo sapiens
atggacgatcaatccaggatgctgcagactctggccggggtgaacctggctggccactcggtgcaggggggcatggccctgccgcctcccccgcacggccacgaaggggcggacggcgacggcaggaagcaggacatcggcgacatcctccaccagatcatgaccatcaccgaccagagcttggacgaggcgcaagcaaagaaacatgccctgaactgtcacagaatgaaaccagcgctcttcagcgtcctgtgtgagatcaaagagaaaacaggtctcagcatcagaggagcccaggaggaggaccctcccgatccccagctaatgagactggacaatatgcttttggcagaaggggtttcaggtcctgagaaaggtgggggatcggcggcagcagctgcagccgcggcagcctctggaggttcttcagataactctattgaacactcagattacagagccaaattgacccagatcagacaaatctatcacacagaactggagaaatatgaacaggcatgtaatgaatttactacacatgtgatgaaccttctccgagaacagagtagaacacgtcccatttctccaaaagagattgaaagaatggtgggcatcatccatcgaaaatttagttccattcagatgcagctcaaacaaagcacttgtgaagcagttatgattttaagatcaaggttccttgatgccagacggaaaaggcgtaacttcagtaaacaggccacagaaatcttgaatgaatatttttactcacacctcagcaacccctaccccagtgaagaagccaaagaggagctggccaagaaatgcagcatcacagtgtcacaggtatccaattggtttggcaacaaacgaatcaggtacaagaagaacattggcaagtttcaggaagaagccaacctctatgctgcaaagacggccgtgacagctgcacacgcagtagcagcagctgtgcagaacaaccagaccaattcgcccaccacaccaaattccggttcttctggttcttttaacctcccaaattctggggacatgttcatgaacatgcagagtctgaatggggattcttaccaagggtcccaagtcggagccaatgtgcaatcacaggtggataccctccgtcatgttatcaatcagacgggaggctacagtgatggccttggaggaaattcactgtacagtccacataatttaaatgctaatggaggctggcaggacgcaacaactccatcttctgtgacttctcctacagaaggcccaggaagtgtgcactcggatacctctaactaatctctggccacacttttcctgagctacatgccttgataagtgcattcagagcaataggaggaaaaggaaagcgtttttgtagcccaccatctacagctttactgtaaaaccttgtcttattcgagaacttggtaaatctgtttttaaggaatcataatcatttgtatttatacttaaaaacacacaatgttaaaaaaaataaagcactttatccaattaggccaagatttaacattgttgacagtcctgtagctattttatcataatttattatcaatattttacattaatggtttcacagttgccaattacttggccttaagggtaaaaagtacaatatacactaaacctcaaccgttaaagcagatgcaaaaattcacctcacctaaattgaacttcttgcatatttccattactgacttggattgtctttctttcatatcactaatggagttggaataaagagctgtttgcctatccctgttaatgatggttgtgtttaagaatcttcctcgtcacgtttgtgttcagatctcttatgttataattagatcagagactggtagcatcgtttctctctctgaaagcaccagtgcccagagtctgctcggtaataaaattatggatccagattgttctgagagacgaagatacttgctgctgatagaggtgaaaacgagattgatccgtctggggttttacggtgtgcactgggtgctgcacagacttgtcaaggtttgctacgtcctctgggcatctgcaaaaggccctgctctctggagtgttgtatatagtgtagcaaaagagtatttatacatcccaccaatcaaaacacagctttattacctcatgcgaactcatacaaaccaatagaatttcaacatgttctgtagcttagagtgctcacttactacctctgaacaatactcacgctgtagtttgtctctttcttatctttttgcatcttgtaattaactctttgtttcccttcataaaatgtaatgtacattgtaatcttttaaaagaaaaatcagggttgcacttgcaacttttaaaaaaccgagtgtggaaacattgggtcttaattcaacacaggatcggtaaaactgttgtaaatactgagaaacattttgaatgttcttcaatcttattactaatccatgca

SEQ ID NO: 215 - DNA, 1396 bp, Homo sapiens
gcgtaattaaaaggcggcggaagaaggtgggagggtcatgacgcagcgagtttcagtcgtgacttttctgggggcatcgcggcgtccccttttttttgcctttaaagtaaaacgtcgccccgacgcaccccccgcgtatttcggggggcggaggcggcgggccacggcgcgaagaggggcggtgctgacgccggccggtcacgtgggcgtgttgtgggggggaggggcgccgccgcgcggtcggttccgggcggttgggagcgcgcgagctagcgagcgagaggcagccgcgcccgccgccgcccctgctctgtatgccgctctctcccggcgcggccgccgccgatcacagcagcaggagccaccgccgccgcggttgatgtggttgggccggggctgaggaggccgccaagatgccgcagtccaagtcccggaagatcgcgatcctgggctaccggtctgtggggaaatcctcattgacgattcaatttgttgaaggccaatttgtggactcctacgatccaaccatagaaaacacttttacaaagttgatcacagtaaatggacaagaatatcatcttcaacttgtagacacagccgggcaagatgaatattctatctttcctcagacatactccatagatattaatggctatattcttgtgtattctgttacatcaatcaaaagttttgaagtgattaaagttatccatggcaaattgttggatatggtggggaaagtacaaatacctattatgttggttgggaataagaaagacctgcatatggaaagggtgatcagttatgaagaagggaaagctttggcagaatcttggaatgcagcttttttggaatcttctgctaaagaaaatcagactgctgtggatgtttttcgaaggataattttggaggcagaaaaaatggacggggcagcttcacaaggcaagtcttcatgctcggtgatgtgattctgctgcaaagcctgaggacactgggaatatattctacctgaagaagcaaactgcccgttctccttgaagataaactatgcttcttttttcttctgttaacctgaaagatatcatttgggtcagagctcccctcccttcagattatgttaactctgagtctgtccaaatgagttcacttccattttcaaattttaagcaatcatattttcaatttatatattgtatttcttaatattatgaccaagaattttatcggcattaatttttcagtgtagtttgttgtttaaaataatgtaatcatcaaaatgatgcatattgttacactactattaactaggcttcagtatatcagtgtttatttcattgtgttaaatgtatacttgtaaataaaatagctgcaaacctcaaaaaaaaaaaaaaaaaaa

SEQ ID NO: 216 - DNA, 2946 bp, Homo sapiens
ggggggaaaggaaaataatacaatttcaggggaagtcgccttcaggtctgctgcttttttatttttttttttttaattaaaaaaaaaaaggacatagaaaacatcagtcttgaacttctcttcaagaacccgggctgcaaaggaaatctcctttgtttttgttatttatgtgctgtcaagttttgaagtggtgatctttagacagtgactgagtatggatcatttgaacgaggcaactcaggggaaagaacattcagaaatgtctaacaatgtgagtgatccgaagggtccaccagccaagattgcccgcctggagcagaacgggagcccgctaggaagaggaaggcttgggagtacaggtgcaaaaatgcagggagtgcctttaaaacactcgggccatctgatgaaaaccaaccttaggaaaggaaccatgctgccagttttctgtgtggtggaacattatgaaaacgccattgaatatgattgcaaggaggagcatgcagaatttgtgctggtgagaaaggatatgcttttcaaccagctgatcgaaatggcattgctgtctctaggttattcacatagctctgctgcccaggccaaagggctaatccaggttggaaagtggaatccagttccactgtcttacgtgacagatgcccctgatgctacagtagcagatatgcttcaagatgtgtatcatgtggtcacattgaaaattcagttacacagttgccccaaactagaagacttgcctcccgaacaatggtcgcacaccacagtgaggaatgctctgaaggacttactgaaagatatgaatcagagttcattggccaaggagtgccccctttcacagagtatgatttcttccattgtgaacagtacttactatgcaaatgtctcagcagcaaaatgtcaagaatttggaaggtggtacaaacatttcaagaagacaaaagatatgatggttgaaatggatagtctttctgagctatcccagcaaggcgccaatcatgtcaattttggccagcaaccagttccagggaacacagccgagcagcctccatcccctgcgcagctctcccatggcagccagccctctgtccggacacctcttccaaacctgcaccctgggctcgtatcaacacctatcagtcctcaattggtcaaccagcagctggtgatggctcagctgctgaaccagcagtatgcagtgaatagacttttagcccagcagtccttaaaccaacaatacttgaaccaccctccccctgtcagtagatctatgaataagcctttggagcaacaggtttcgaccaacacagaggtgtcttccgaaatctaccagtgggtacgcgatgaactgaaacgagcaggaatctcccaggcggtatttgcacgtgtggcttttaacagaactcagggcttgctttcagaaatcctccgaaaggaagaggaccccaagactgcatcccagtctttgctggtaaaccttcgggctatgcagaatttcttgcagttaccggaagctgaaagagaccgaatataccaggacgaaagggaaaggagcttgaatgctgcctcggccatgggtcctgcccccctcatcagcacaccacccagccgtcctccccaggtgaaaacagctactattgccactgaaaggaatgggaaaccagagaacaataccatgaacattaatgcttccatttatgatgagattcagcaggaaatgaagcgtgctaaagtgtctcaagcactgtttgcaaaggttgcagcaaccaaaagccagggatggttgtgcgagctgttacgctggaaagaagatccttctccagaaaacagaaccctgtgggagaacctctccatgatccgaaggttcctcagtcttcctcagccagaacgtgatgccatttatgaacaggagagcaacgcggtgcatcaccatggcgacaggccgccccacattatccatgttccagcagagcagattcagcaacagcagcagcaacagcaacagcagcagcagcagcagcaggcaccgccgcctccacagccacagcagcagccacagacaggccctcggctccccccacggcaacccacggtggcctctccagcagagtcagatgaggaaaaccgacagaagacccggccacgaacaaaaatttcagtggaagccttgggaatcctccagagtttcatacaagacgtgggcctgtaccctgacgaagaggccatccagactctgtctgcccagctcgaccttcccaagtacaccatcatcaagttctttcagaaccagcggtactatctcaagcaccacggcaaactgaaggacaattccggtttagaggtcgatgtggcagaatataaagaagaggagctgctgaaggatttggaagagagtgtccaagataaaaatactaacacccttttttcagtgaaactagaagaagagctgtcagtggaaggaaacacagacattaatactgatttgaaagactgagataaaagtatttgtttcgttcaacagtgccactggtatttactaacaaaatgaaaagtccaccttgtcttctctcagaaaacctttgttgttcattgtttggccaatgaatcttcaaaaacttgcacaaacagaaaagttggaaaaggataatacagactgcactaaatgttttcctctgttttacaaactgcttggcagccccaggtgaagcatcaaggattgtttggtattaaaatttgtgttcacgggatgcaccaaagtgtgtaccccgtaagcatgaaaccagtgttttttgttttttttttagttcttattccggagcctcaaacaagcattataccttctgtgattatgatttcctctcctataattatttctgtagcactccacactgatctttggaaacttgccccttatttaaaaaaaaaaaaaaaaaa

SEQ ID NO: 217 - DNA, 1873 bp, Homo sapiens
ccacgtgagcgcctgcgtttctcctcaaacctaacgatgccgccggagcggaggagacgaatgaaactggaccggagaaccggagcgaagcgaagcggaagcccggaatgaggccggactggaaagccggagcggggccaggcgggcctccccaaaagcctgccccttcatcccagcggaaaccgccggcccggccgagcgcggcggccgctgcgattgcagtcgcggcggcggaggaagagagacggctccggcagcggaaccgcctgaggctggaggaggacaaaccggccgtggagcggtgcttggaggagctggtcttcggcgacgtcgagaacgacgaggacgcgttgctgcggcgtctgcgaggcccgagggttcaagaacatgaagactcgggtgactcagaagtggagaatgaagcaaaaggtaattttccacctcaaaagaagccagtttgggtggatgaagaagatgaagatgaggaaatggttgacatgatgaacaatcggtttcggaaggatatgatgaaaaatgctagtgaaagtaaactttcgaaagacaaccttaaaaagagacttaaagaagaattccaacatgccatgggaggagtacctgcctgggcagagactactaagcggaaaacatcttcagatgatgaaagtgaagaggatgaagatgatttgttgcaaaggactgggaatttcatatccacatcaacttctcttccaagaggaatcttgaagatgaagaactgccagcatgcgaatgctgaacgtcctactgttgctcggatctcatctgtgcagttccatcccggtgcacagattgtgatggttgctggattagataatgctgtatcactatttcaggttgatgggaaaacaaatcctaaaattcagagcatctatttggaaaggtttccaatctttaaggcttgttttagtgctaatggggaagaagttttagccacgagtacccacagcaaggttctttatgtctatgacatgctggctggaaagttaattcctgtgcatcaagtgagaggtttgaaagagaagatagtgaggagctttgaagtctccccagatgggtccttcttgctcataaatggcattgctggatatttgcatttgctagcaatgaagaccaaagaactgattggaagcatgaaaattaatggaagggttgcagcatccacattctcttcagatagtaagaaagtatacgcctcttcgggggatggagaagtttatgtttgggatgtgaactcaaggaagtgccttaacagatttgttgatgaaggcagtttatatggattaagcattgccacatctaggaatggacagtatgttgcttgtggttctaattgtggagtggtaaatatatacaatcaagattcttgtctccaagaaacaaacccaaagccaataaaagctataatgaacttggttacaggtgttacttctctgaccttcaatcctactacagaaatcttggcaattgcttcagaaaaaatgaaagaagcagtcagattggttcatcttccttcctgtacagtattttcaaacttcccagtcattaaaaataagaatatttctcatgttcataccatggatttttctccgagaagtggatactttgccttggggaatgaaaaggcaaggccctgatgtataggttgcaccattactcagacttctaaagagactatttgaagtccagttgagtcacaagagaagcctgtcttgatatatcatctcagaaactttcctgaatatgtgataatatatggaaaatgatttatagatccagctgtgcttaagagccagtaatgtcttaataaacatgtggcagcttttgtttgaaaaaa

SEQ ID NO: 218 - DNA, 1398 bp, Homo sapiens
cccagccggtccaggcctctggcgaacatggcgcttgtcccctgccaggtgctgcggatggcaatcctgctgtcctactgctctatcctgtgtaactacaaggccatcgaaatgccctcacaccagacctacggagggagctggaaattcctgacgttcattgatctggttatccaggctgtcttttttggcatctgtgtgctgactgatctttccagtcttctgactcgaggaattgggaaccaggagcaagagaggcagctcaagaagctcatctctctccgggactggatgttagctgtgttggcctttcctgttggggtttttgttgtagcagtgttctggatcatttatgcctatgacagagagatgatatacccgaagctgctggataattttatcccagggtggctgaatcacggaatgcacacgacggttctgccctttatattaatcgagatgaggacatcgcaccatcagtatcccagcaggagcagcggacttaccgccatatgtaccttctctgttggctatatattatgggtgtgctgggtgcatcatgtaactggcatgtgggtgtaccctttcctggaacacattggcccaggagccagaatcatcttctttgggtctacaaccatcttaatgaacttcctgtacctgctgggagaagttctgaacaactatatctgggatacacagaaaagtatggaagaagagaaagaaaagcctaaattggaatgagatccaagtctaaacgcaagagctagattgagccgccattgaagactccttcccctcgggcattggcagtgggggagaaaaggcttcaaaggaacttggtggcatcagcacccccctcccccaatgaggacaccttttatatataaatatgtataaacatagaatacagttgtttccaaaagaactcaccctcactgtgtgttaaagaattcttcccaaagtcattactgataataacattttttccttttctagttttaaaaccagaattggaccttggatttttattttggcaattgtaactccatctaatcaagaaagaataaaagtttattgcacttctttttgagaaatatgttaaagtcaaaggggcatatatagagtaaggcttttgtgtatttaatcctaaaggtggctgtaatcatgaacctaggccaccatggggacctgagagggaaggggacagatgtttctcattgcataatgtcacagttgcctcaaatgagcaccatttgtaataatgatgtcaatttcatgaaaagcctgagtgtattgcatctcttgatttaatcatgtgaaacttttcctagatgcaaatgctgactaataaagacaaagccaccctgaaaaaaaaaaaaaaaaaaaaaaaaaaaa

SEQ ID NO: 219 - DNA, 2197 bp, Homo sapiens
cggcgccattaaagcgaggaggaggcgagagcggccgccgctggtgcttattcttttttagtgcagcgggagagagcgggagtgtgcgccgcgcgagagtgggaggcgaagggggcaggccagggagaggcgcaggagcctttgcagccacgcgcgcgccttccctgtcttgtgtgcttcgcgaggtagagcgggcgcgcggcagcgcggggattactttgctgctagtttcggttcgcggcaggcgggtgtagtctcggcggcagcggcggagacactagcactatgtcggaggagcagttcggcggggacggggcggcggcagcggcaacggcggcggtaggcggctcggcgggcgagcaggagggagccatggtggcggcgacacagggggcagcggcggcggcgggaagcggagccgggaccgggggcggaaccgcgtctggaggcaccgaagggggcagcgccgagtcggagggggcgaagattgacgccagtaagaacgaggaggatgaaggccattcaaactcctccccacgacactctgaagcagcgacggcacagcgggaagaatggaaaatgtttataggaggccttagctgggacactacaaagaaagatctgaaggactacttttccaaatttggtgaagttgtagactgcactctgaagttagatcctatcacagggcgatcaaggggttttggctttgtgctatttaaagaatcggagagtgtagataaggtcatggatcaaaaagaacataaattgaatgggaaggtgattgatcctaaaagggccaaagccatgaaaacaaaagagccggttaaaaaaatttttgttggtggcctttctccagatacacctgaagagaaaataagggagtactttggtggttttggtgaggtggaatccatagagctccccatggacaacaagaccaataagaggcgtgggttctgctttattacctttaaggaagaagaaccagtgaagaagataatggaaaagaaataccacaatgttggtcttagtaaatgtgaaataaaagtagccatgtcgaaggaacaatatcagcaacagcaacagtggggatctagaggaggatttgcaggaagagctcgtggaagaggtggtggccccagtcaaaactggaaccagggatatagtaactattggaatcaaggctatggcaactatggatataacagccaaggttacggtggttatggaggatatgactacactggttacaacaactactatggatatggtgattatagcaaccagcagagtggttatgggaaggtatccaggcgaggtggtcatcaaaatagctacaaaccatactaaattattccatttgcaacttatccccaacaggtggtgaagcagtattttccaatttgaagattcatttgaaggtggctcctgccacctgctaatagcagttcaaactaaattttttgtatcaagtccctgaatggaagtatgacgttgggtccctctgaagtttaattctgagttctcattaaaagaaatttgctttcattgttttatttcttaattgctatgcttcagaatcaatttgtgtgttatgccctttcccccagtattgtagagcaagtcttgtgttaaaagcccagtgtgacagtgtcatgatgtagtagtgtcttactggttttttaataaatccttttgtataaaaatgtattggctcttttatcatcagaataggaaaaattgtcatggattcaagttattaaaagcataagtttggaagacaggcttgccgaaattgaggacatgattaaaattgcagtgaagtttgaaatgtttttagcaaaatctaatttttgccataatgtgtcctccctgtccaaattgggaatgacttaatgtcaatttgtttgttggttgttttaataatacttccttatgtagccattaagatttatatgaatattttcccaaatgcccagtttttgcttaatatgtattgtgctttttagaacaaatctggataaatgtgcaaaagtacccctttgcacagatagttaatgttttatgcttccattaaataaaaaggacttaaaatctgttaattataatagaaatgcggctagttcagagagatttttagagctgtggtggacttcatagatgaattcaagtgttgagggaggattaaagaaat

SEQ ID NO: 220 - DNA, 1719 bp, Homo sapiens
cgcacggccgcgcagatctgtcttgctggaagctttttcctagaggttgagcggtttgcacaatgtcggaaatggctgagttgtccgagctgtatgaagagagcagtgacctgcagatggatgtgatgcctggcgagggtgaccttccgcagatggaggtaggcagcgggagccgggagctatccctgcgtccctcccgcagcggggcccaacagctcgaggaggaaggcccaatggaggaggaggaggcccagccaatggcggcgccagaggggaaacggagccttgctaacgggcccaacgctggggagcagccaggccaggtggcgggcgcagacttcgagagcgaggacgagggcgaggaatttgatgactgggaggacgactacgactatcccgaagaggagcagctcagtggtgccggctacagagtatcagccgctcttgaagaagccgacaagatgtttctgagaacaagagaaccagccctggatggcgggtttcagatgcattatgagaagaccccgtttgatcagttagcttttatcgaagagcttttttcactgatggttgtcaatcgtctgaccgaagaactcggctgtgatgagattattgatagagagtagttagatgctgttaaaagaggaggaaactacttgaggagggacccaactttccgctatcttttgggttcattccaaatagttttgtgccattgaaaaacttgaccttcaaaaaaatttgtttttcagaatagaacacaataggacagtgactgcacagttgtgaaaaaggaagagaatcattaaagaaaaagaaaaaagattttaagaccgttgaaatcaattatcaagaacgtcctaaaacacctatggctttgactttgttattgatccagattattttccttgcattggggaaaatatctttcatatttgtttgctgtaaagatggttttgcaagaataagtcatgaccaagacaaactgccaatacaaaagcccactgatactaattatataatgagaaaaaaatgtatccaactaggacacatatcttttgagttatttggactgaaagcttaagaaaacttggaaaattctattttgtgatctagtcaagccacagttatcaaaggctacattttcagtgtaagataaatggatgagtaaactcaaatatgtatcacgtgtgctttgtatcttaagatgtgtttccaagagcatctgaaattttgtttgtacatgtatcttgatcatttataaagccactgtgatctataaatcaagaaaatccattgtcataaccatttttaaaagtcaaaaattaagacatccttaattaaaaagtttcaaatctagacactaaatgtgtgtgaatgtacaaagaaaacaaaccattgcttatgctgttatatactagagaaattttgttttgcttgctgttttaacttgacagatgaaggactttagttgaacttcatattgtaagaactgttaataaaagttgtcaagtaaaaagcgctatatctaaaaagactttatgaacagttattctatcaacttttaaaggttttaaacctgcccagaaattaccttggtatctgaagtttccctctgtctcctcctctaattaagcttgttatttgtcatgcaccagcattggagataataaaatttcttgttctgtgtaaaaaaaaaaaaaaaaaaaaaaaaaaaaa

SEQ ID NO: 221 - DNA, 1733 bp, Homo sapiens
ggacgaggggggagcggaggtggcggcggcggcggtagcggtggccttggttgtcttccagtctcctcggctcgccctttagccggcaccgctccccttccctcccccttcctctcttccttccttccctccccttccctttttcccttccccgtcggtgagcggcgggggtggctccagcaacggctgggcccaagctgtgtagaggccttaaccaacgataacggcggcgacggcgaaacctcggagctcgcagggcgggggcaaggcccgggccttggagatggagaattctcagttgtgtaagctgttcatcggcggcctcaatgtgcagacgagtgagtcgggcctgcgcggccactttgaggcctttgggactctgacggactgcgtggtggtggtgaatccccagaccaagcgctcccgttgctttggcttcgtgacctactccaatgtggaggaggcggacgccgccatggccgcctcgccccatgccgtggacggcaacactgtggagctgaagcgggcggtgtcccgggaggattcggcgcggcccggtgcccacgccaaggttaagaagctctttgtcggaggccttaaaggagacgtggctgagggcgacctgatcgagcacttctcgcagtttggcaccgtggaaaaggccgagattattgccgacaagcagtccggcaagaagcgtggattcggcttcgtgtatttccagaatcacgacgcggcagacaaggccgcggtggtcaagttccatccgattcagggccatcgcgtggaggtgaagaaagcagtccccaaggaggatatctactccggtgggggtggaggcggctcccgatcctcccggggcggccgaggcggccgggggcgcggcggtggtcgagaccagaacggcctttccaagggcggcggcggcggttacaacagctacggtggttacggcggcggcggaggcggcggctacaatgcctacggaggcggcggcggcggttcgtcctacggtgggagcgactacggtaacggcttcggcggcttcggcagctacagccagcatcagtcctcctatgggcccatgaagagcggcggcggcggcggcggtggaggcagtagctggggcggtcgcagtaatagtggaccttacagaggcggctatggcggtgggggtggctatggaggcagctccttctaaaagaaaatttaaaatgcctgggagtggctataggggtagctctttccaacagcccaagtggggtcaactcctaagccccaccccctcacacacaccgccttccctgttttgcccttgggggagccacttctaaggctgcttacccttgggggtgttcctctatttgcctgccacctctcttgtctctccctctgaagatggactcggccccacatacacatttttgtgttacagtcattgatggactctatttttttattattacttggaccttggtcgtttttatactagcaaaatgtcttgttttaatttgtgttttttggggggagggagggagtgaacttgctgattctgtagcaaaacctgggtgggggttggggtggggggtagtttactttgttgtaaggacttgataacctggctacagcgttttctatgaaatctacttggatcccatgcctgaaatttggaagcatatgtacacaaatcatttttacgttttatttttaataaatcattgtgtttgaccgta

SEQ ID NO: 222 - DNA, 3827 bp, Homo sapiens
ggtacctctccttttccctctccctttccctaagagttgtctgctggttctcagcttgaagaagattctgcagtccttattgatcctttttcttggcgttaccatttttgaagcaaagttaacctagctttctagtttgagctttctttttggccgtctttaaaaaaaattttttttttaatctataaaatagacaagagctagttctacaatgtccaagtcattccagcagtcatctctcagtagggactcacagggtcatgggcgtgacctgtctgcggcaggaataggccttcttgctgctgctacccagtctttaagtatgccagcatctcttggaaggatgaaccagggtactgcacgccttgctagtttaatgaatcttggaatgagttcttcattgaatcaacaaggagctcatagtgcactgtcttctgctagtacttcttcccataatttgcagtctatatttaacattggaagtagaggtccactccctttatcttctcaacaccgtggagatgcagaccaggccagtaacattttggccagctttggtctgtctgctagagacttagatgaactgagtcgttatccagaggacaagattactcctgagaatttgccccaaatccttctacagcttaaaaggaggagaactgaagaaggccctaccttgagttatggtagagatggcagatctgctacacgggagccaccatacagagtacctagggatgattgggaagaaaaaaggcactttagaagagatagttttgatgatcgtggtcctagtctcaacccagtgcttgattatgaccatggaagtcgttctcaagaatctggttattatgacagaatggattatgaagatgacagattaagagatggagaaaggtgtagggatgattctttttttggtgagacctcgcataactatcataaatttgacagtgagtatgagagaatgggacgtggtcctggccccttacaagagagatctctctttgagaaaaagagaggcgctcctccaagtagcaatattgaagacttccatggactcttaccgaagggttatccccatctgtgctctatatgtgatttgccagttcattctaataaggagtggagtcaacatatcaatggagcaagtcacagtcgtcgatgccagcttcttcttgaaatctacccagaatggaatcctgacaatgatacaggacacacaatgggtgatccattcatgttgcagcagtctacaaatccagcaccaggaattctgggacctccacctccctcatttcatcttgggggaccagcagttggaccaagaggaaatctgggtgctggaaatggaaacctgcaaggacctagacacatgcagaaaggcagagtggaaactagcagagttgttcacatcatggattttcaacgagggaaaaacttgagataccagctattacagctggtagaaccatttggagtcatttcaaatcatctgattctaaataaaattaatgaggcatttattgaaatggcaaccacagaggatgctcaggccgcagtggattattacacaaccacaccagcgttagtatttggcaagccagtgagagttcatttatcccagaagtataaaagaataaagaaacctgaaggaaagccagatcagaagtttgatcaaaagcaagagcttggacgtgtgatacatctcagcaatttgccgcattctggctattctgatagtgctgttctcaagcttgctgagccttatgggaaaataaagaattacatattgatgaggatgaaaagtcaggcttttattgagatggagacaagagaagatgcaatggcaatggttgaccattgtttgaaaaaagccctttggtttcaggggagatgtgtgaaggttgacctgtctgagaaatataaaaaactggttctgaggattccaaacagaggcattgatttactgaaaaaagataaatcccgaaaaagatcttactctccagatggcaaagaatctccaagtgataagaaatccaaaactgatggttcccagaagactgagagttcaaccgaaggtaaagaacaagaagagaagtccggtgaagatggtgagaaagacacaaaggatgaccagacagagcaggaacctaatatgcttcttgaatctgaagatgagctacttgtagatgaagaagaagcagcagcactgctagaaagtggcagttcagtgggagacgagaccgatcttgctaatttaggtgatgtggcttctgatgggaaaaaggaaccatcagataaagctgtgaaaaaagatggaagtgcttcagcagcagcaaagaaaaagcttaaaaaggtggacaagatcgaggaacttgatcaagaaaacgaagcagcgttggaaaatggaattaaaaatgaggaaaacacagaaccaggtgctgaatcttctgagaacgctgatgatcccaacaaagatacaagtgaaaacgcagatggtcaaagtgatgagaacaaggacgactatacaatcccagatgagtatagaattggaccatatcagcccaatgttcctgttggtatagactatgtgatacctaaaacagggttttactgtaagctgtgttcactcttttatacaaatgaagaagttgcaaagaatactcattgcagcagccttcctcattatcagaaattaaagaaatttctgaataaattggcagaagaacgcagacagaagaaggaaacttaagatgtgcaaggagatttaatgatttcaaagaaaataatggttctttgtttttaatgttaaccttttttaaatacaatactgatagttagaagaaaactattgtactcttttgttttagtggagaaataatagatgtctgttcatgtgttaagtgttatagcaaaaaaaatacacatatggttaagttaatgaatagtttttgttttatcagaatggcaacagacagaagtactttgtagagattgacttcctaagctacttaagacaacttgcaccactaagaaaaaaatgtagaaccatttggaaaaatgaaatttagtagttccaagtttcaaagaaatgtcaacattttattccattcaataaagaacaaaaccaatagtgtttttattactttcatctgaaacattccatgttttaatctgagccttgcagactttcatttggagtttgaacccgttttggttgcatttcatttttggagaacttaattaacgtgagattggcaattgaaatgcaggtgcagttttctgttaatgtcatgctgttgtttaggtaataagaaatattaagtaattggctttagattttgtaatttttttccctgagttcctgctagatttcgtattctagtagtcaatgtattttcagtgaaatgcaaaaatattcccgttatctttgaccagtattaatttttgagatcttactgcttgtcacttgaatcccgtgattgtcatacatctctggtataagcaacatttgatttttgaagtgtgtagaccatctcttcatattttcaagatgtaattttacatttctgcatttttaaaacagtttggccataatcctagatgcacgcttctaattcatgtacctgcacatgtgacctttgtgaacagaaatttgcatgtataatttgtgtttacttgtaactttctggttatatactgcttatatctgtggattcaagttactgaagtgaataccaataaaaagaaaaccctaggccatgttaattggttatacatgtttggaatgttaaaaaaaaaaaaaaaaaaaaaaaaaaaaaaaa

SEQ ID NO: 223 - DNA, 1433 bp, Homo sapiens
cgcctttgcccgaagcccggggacgaaccgacggaccgaccgcctggcgcacggacgcgggcgctcgctttgtgttcggggctagcgtcggcgaggcttgagcttgcagcgcgcggcttccctgctttctcgcggccaccccggctccggcggcctcggcgcgcgaggggctggaggtgcgggagccgctctccgccggtcggtccccgcgcggctgagcccaggccgccagcgccgcggccccgtgcggtgtccctgagctcctgctccccgccgggctgctccgagcaacggtgcttcggagctccaaactcgggctgccggggcaagtgtcttcatgaacccagaggatgtccgggaagcactacaagggtcctgaagtcagttgttgcatcaaatacttcatatttggcttcaatgtcatattttggtttttgggaataacatttcttggaattggactgtgggcatggaatgaaaaaggagttctgtccaacatctcttccatcaccgatctcggcggctttgacccagtttggctcttccttgtggtgggaggagtgatgttcattttgggatttgcagggtgcattggagcgctacgggaaaacactttccttctcaagtttttttctgtgttcctgggaattattttcttcctggagctcactgccggagttctagcatttgttttcaaagactggatcaaagaccagctgtatttctttataaacaacaacatcagagcatatcgggatgacattgatttgcaaaacctcatagacttcacccaggaatattggcagtgctgtggggcttttggagctgatgattggaacctaaatatttacttcaattgcacagattccaatgcaagtcgagagcgatgtggcgttccattctcctgctgcactaaagatcccgcagaagatgtcatcaacactcagtgtggctatgatgccaggcaaaaaccagaagttgaccagcagattgtaatctacacgaaaggctgtgtgccccagtttgagaagtggttgcaggacaatttaaccatcgttgctggtattttcataggcattgcattgctgcagatatttgggatatgcctggcccagaatttggttagcgatatcgaagctgtcagggcgagctggtagaccccctgcaaccgctgctgcaagacactggacagacccagctttcgggaccctcccgcgtgccgaactgatcttcgagctgcatggacctaatcacagatgcagcctgcagtctcgcctaatggagctgccattaggggagtgtaaaactgggaaatgctgctcactgacagaattaaaaaaaaaaataaccagtatgaaagtcgttgcgccgtgaatctctactgtagccatgaatttatggacagttagatgcttaccaaaaaagaaaaaaaa

SEQ ID NO: 224 - DNA, 385 bp, Homo sapiens
  misc_feature (16)..(16): N may be C, G, T or A
  misc_feature (22)..(22): N may be C, G, T or A
tgttctgtggtggatnatggantaaacaggtttcgaggcctggctcagcagccgctgcaggtgctggtggtgctggagctctgtgtgttcctgagccgctgtctgctcggtgttttcaggcggactctgggccccatgtagggcactcgtctcggtaccgtctccattctcgtccgtgcagtgggaagtgaaatgtcagcactgtatgatcatcgtgggtgggaaggccccgctcccctacttggagctgcatttcacagtggtcttctgtaggtagatgtactgcgatcccaggggtatgcttgagctgaaatcattaaaagtcagagatatttgtcaacgtaattttagctcctttcctacttgttccttcacctagccgaga

SEQ ID NO: 225 - DNA, 5165 bp, Homo sapiens
tctcagctcccagctccccgctcccggctcccggcgcccggcgcccggcgcggagctgttcctcaaacgacacgcagccgaggtgggtgggtgtggggacgcgggagccagtgtcgtcggatcggcccgcagtccgctgtcctgctgagcccggaggccgcctggatggagccgccgctcccggtcggagcccagccgcttgccactgtcgagggtatggagatgaagggtcctctccgggagccctgcgccctgaccctagcccagaggaacgggcaatatgagttaataatccagttgcatgagaaggaacagcatgttcaagatatcattcctataaatagccacttcagatgtgttcaagaagcagaagaaactcttttgattgacatagcttctaacagtggctgcaaaattcgggttcagggggactggatcagagagcgccgctttgaaatccctgatgaggaacactgtttgaagttcctctcagctgtccttgctgctcagaaagctcagtcacagcttcttgttccagagcaaaaggactcatctagctggtaccagaaattagacactaaggacaaaccttctgttttttcagggcttcttggatttgaagacaatttttcttctatgaatttggacaagaaaataaattcacaaaatcagcctactgggattcatcgggaacccccacctccacccttttcagtgaataaaatgcttccacgtgaaaaagaagcttctaacaaggagcagcccaaagtgaccaacaccatgcggaagctctttgtaccaaatacccaatctgggcagcgggagggtctcatcaaacatatcctggcaaagcgagagaaagaatatgtcaacattcagactttcagattttttgttggaacttggaatgtgaatggccagtctccagatagcgggttagaaccttggctgaactgtgatcccaatcctcctgatatctactgcattggattccaagaactggacttgagcacagaagccttcttctactttgaatctgtgaaggaacaagaatggtccatggctgtagagagaggtttgcattccaaagccaagtataagaaagttcaactggtgcgccttgttgggatgatgcttcttatatttgccagaaaggatcagtgtcgatacattcgtgatattgctacagaaacagttggaactggaatcatggggaaaatgggaaacaaaggtggggtagctgtgagatttgtatttcacaacaccaccttttgcattgtcaattcccatctggctgcacacgtggaggactttgagagaaggaatcaagattataaggacatttgtgcgagaatgagttttgtggtcccaaatcagaccctcccgcagttgaacatcatgaaacatgaggttgtcatttggttgggagatttgaattatagactttgcatgcctgatgccaatgaggtgaaaagtcttattaataagaaagaccttcagagactcttgaaattcgaccagctaaatattcagcgcacacagaaaaaagcttttgttgacttcaatgaaggggaaatcaagttcatccccacttataagtatgactctaaaacagaccggtgggattccagtgggaaatgccgggttccagcctggtgtgaccgaattctttggagaggaacaaatgttaatcagcttaattatcggagtcacatggaactgaaaaccagcgaccacaagcctgttagcgccctcttccatattggggtgaaggttgtggatgaacgaaggtaccggaaagtctttgaagatagtgtacgcatcatggacagaatggaaaatgacttccttccttccttagaactcagcaggagggagtttgtgtttgaaaatgtgaagtttcggcaactacaaaaggagaagttccagatcagcaacaatggacaggttccctgccatttttctttcatccctaaacttaatgacagccagtactgcaagccatggcttcgggctgaaccttttgagggctacttggagccaaatgagacagtggacatttctcttgatgtgtatgtcagcaaagactctgtaaccatcctgaactcgggagaagataagattgaagatattctcgtccttcacctggatcgaggcaaagattacttcttgactatcagtggaaattacctcccaagttgttttggcacatccttagaggctctgtgccgtatgaaaagaccaatccgagaagttcctgttaccaaactcatagacttggaagaagacagcttcctagaaaaggagaaatcccttctgcaaatggttcctttggatgaaggtgccagtgagagaccccttcaggttcccaaggagatctggcttctagtagatcacctattcaaatacgcctgtcaccaggaggacctgttccagacccctggaatgcaggaagagctccagcagatcattgattgtctggataccagcattcctgagacaatccctggcagcaaccactctgtggctgaagcactgctcattttcttggaagccctgccagagccagtcatctgttacgagctgtatcagcgatgtcttgactctgcttatgatccccggatctgccgacaggtgatctcccagcttccgagatgccatagaaatgttttccgttacttgatggcattccttcgagaactcttaaaattctctgaatacaatagcgtcaatgccaacatgatcgctactctcttcactagtcttctcctgaggcctccacccaaccttatggcaagacagactccaagtgaccgccagcgtgctattcagttccttctgggctttctgcttgggagcgaagaagactaaggcttttactgttctctgatattctagaagcagacgatctcgggctccaagtatttcagaatgatttaaaaagtcatgccacaggaagggtctattgcagaatttcaagttctgtttatagtaaaaaggaagagcgtttcctaatccctcctttaccatatcctacacagaaaaatacttttagacttatattgccaagccaaagttaccatattttggtgtttttgtgttttctctttataaggcaaaaagatctgtatttacactccttcacctagggatgtgtttgttgccctcctacccaattgtcatgattgtccttagtaccctaggcctagattctgagatcttcccattctaggcctacaagcactacttgctgtagctgagacttgtctagagtcctttgttttgcacttttgacccaccccttcctggatcactcctttgcactccactcccctcgttctgtcactttgaacgaagtctgagtgaggctagtgactccttgggtgtcctcaacagtgaattcactgtctgcgtgcagttattacatgcatttgtgcatttctactacaatggcatctttatgtctctgtaacattggccttttcatggctccacactgggtggaaccatattctcttagatcacatttagtagcataactgtagggactattagagatggcatctcatcgatgagagagaatcacaatcagaatggaagcactttgagtatctgaagagtgagagcattcatgtttgacaggtcctgcttcccactatccttttcctgttattattcaaattttacacaaggactaatcctgggtgtctctgagacccatctcctgcctagacatccacctccagagcaacactggccccacagtaaaagaggaagtcttgtacctcaggcaggcccatctagagctattgctccttcccacagcaaaggtattgtggatgacccttagaatccattctctggtcttctgaaataccaagggcagatgtcacctccttcctcagcaggactgactctgggctctacaaccagctccttcacataaagggtttagagactccccttggctcccagtcaccatatccagtgttgtgtaaagagactggccaacaggaccaaccaagcaccttacctctcccatacaagatgaccctctgagcttttcatttattcaagctctgtggtacagcctttttttaaaataaattaatctatattggttgacaaacaagccaccaaccactgactgcaaaactgcctgatgcagttgggttcctcctggttttcttttgttacaaccacccttgcctgtttacattaattgcaaggagcataacgtacaggctgtatgtacaatcctgggcattgactctgtgacatttctagcatatccaaggcaccaccagtgatttctcctgtttcttggtgggggtgggggggaaggtacgtattctgcaatatggctaaaccctttcctgattgagagttaaagcaataggagtcaagttactggtgccacagatctggaggtatgataggtcaggggctaggtgttgaacttagttaatggaagactgagagcagaacaggtttgtcatctccgcaaggccagaaagtgatcacaaaaagaggcagatgatagacactggggtagggtcataccacagggaaatacctttcctgggcttgttttctagcatatcactgacctgggatctttgggtgatcaagggtgtggttagtggaggctctgtgctgcacgtatgcagtatcctatctctttctacatcagatcaaaacactaagttggtgtactgcctcgaccttttttcagctcatcctggaacatatacagagttgagagttttagacaatctctaggtagaggagacaagatgtagacccagacagaagaaatctgcttccctaccatggctattccagcaccccaacctgtaattgccaagtcctctaaggtactaatttgtagctgctctgaagtaaggatttcggattcagctggtagggaaagactctgcacctgctgtcttagggaagaaatggttcaaatccatgtggtgacattgcattagtctccctttcactgttttcttattctgtaattgtttgttatatttcccaaaaacgtcttgatcactaagcaaagctgctagtgggattctatatttcgtgtcatcttttttattataatttattgcaaatttttttctgaataaatatatgttgtgtgaaaaaaaaaaaaa

SEQ ID NO: 226 - DNA, 1284 bp, Homo sapiens
ggctccttcgggaaacccagccccgtcaccgggctccgagcggctcgcaggcgagcgacagcggcctcagccccggcagcgcccagcggcggctgcggaaagcggagggagtccgacgcgggcgcgggcggggagcgtgcgtccgttcgcacaggcagcgggaggaggggcggcgcgaaccatggccggggacagcgagcagaccctgcagaaccaccagcagcccaacggcggcgagcccttccttataggcgtcagcgggggaacagctagcggcaagtcttccgtgtgtgctaagatcgtgcagctcctggggcagaatgaggtggactatcgccagaagcaggtggtcatcctgagccaggatagcttctaccgtgtccttacctcggagcagaaggccaaagccctgaagggccagttcaactttgaccacccggatgcctttgacaatgaactcattctcaaaacactcaaagaaatcactgaagggaaaacagtccagatccccgtgtatgactttgtctcccattcccggaaggaggagacagttactgtctatcccgcagacgtggtgctctttgaagggatcctggccttctactcccaggaggtacgagacctgttccagatgaagctttttgtggatacagatgcggacacccggctctcacgcagagtattaagggacatcagcgagagaggcagggatcttgagcagattttatctcagtacattacgttcgtcaagcctgcctttgaggaattctgcttgccaacaaagaagtatgctgatgtgatcatccctagaggtgcagataatctggtggccatcaacctcatcgtgcagcacatccaggacatcctgaatggagggccctccaaacggcagaccaatggctgtctcaacggctacaccccttcacgcaagaggcaggcatcggagtccagcagcaggccgcattgacccgtctccatcggaccccagcccctatctccaagagacagaggaggggtcaggaggcactgctcatctgtacatactgtttcctatgacattactgtatttaagaaaacaccatggagatgaaatgcctttgattttttttttctttttgtactttggaacgacaaaatgaaacagaacttgaccctgagcttaaataacaaaactgtgccaactactactggtgatgcctaattatgaatccaacgtgtaaccagttataaatacatatatatataaaaaaaaaaaaaaaaaaaaaaaaaaaaaaaaaaaaaaaa

SEQ ID NO: 227 - DNA, 3826 bp, Homo sapiens
gaattcgggtggagtcctgaaggagggcctgatgtcttcatcattctcaaattcttgtaagctctgcgtcgggtgaaaccagacaaagccgcgagcccagggatgggagcacgcgggggacggcctgccggcggggacgacagcattgcgcctgggtgcagcagtgtgcgtctcggggaagggaagatattttaaggcgtgtctgagcagacggggaggcttttccaaacccaggcagcttcgtggcgtgtgcggtttcgacccggtcacacaaagcttcagcatgtcatgtgaggacggtcgggccctgaaaggaacgctctcggaattggccgcggaaaccgatctgcccgttgtgtttgtgaaacagagaaagataggcggccatggtccaaccttgaaggcttatcaggagggcagacttcaaaagctactaaaaatgaacggccctgaagatcttcccaagtcctatgactatgaccttatcatcattggaggtggctcaggaggtctggcagctgctaaggaggcagcccaatatggcaagaaggtgatggtcctggactttgtcactcccacccctcttggaactagatggggtcttggaggaacatgtgtgaatgtgggttgcatacctaaaaaactgatgcatcaagcagctttgttaggacaagccctgcaagactctcgaaattatggatggaaagtcgaggagacagttaagcatgattgggacagaatgatagaagctgtacagaatcacattggctctttgaattggggctaccgagtagctctgcgggagaaaaaagtcgtctatgagaatgcttatgggcaatttattggtcctcacaggattaaggcaacaaataataaaggcaaagaaaaaatttattcagcagagagttttctcattgccactggtgaaagaccacgttacttgggcatccctggtgacaaagaatactgcatcagcagtgatgatcttttctccttgccttactgcccgggtaagaccctggttgttggagcatcctatgtcgctttggagtgcgctggatttcttgctggtattggtttaggcgtcactgttatggttaggtccattcttcttagaggatttgaccaggacatggccaacaaaattggtgaacacatggaagaacatggcatcaagtttataagacagttcgtaccaattaaagttgaacaaattgaagcagggacaccaggccgactcagagtagtagctcagtccaccaatagtgaggaaatcattgaaggagaatataatacggtgatgctggcaataggaagagatgcttgcacaagaaaaattggcttagaaaccgtaggggtgaagataaatgaaaagactggaaaaatacctgtcacagatgaagaacagaccaatgtgccttacatctatgccattggcgatatattggaggataaggtggagctcaccccagttgcaatccaggcaggaagattgctggctcagaggctctatgcaggttccactgtcaagtgtgactatgaaaatgttccaaccactgtatttactcctttggaatatggtgcttgtggcctttctgaggagaaagctgtggagaagtttggggaagaaaatattgaggtttaccatagttacttttggccattggaatggacgattccgtcaagagataacaacaaatgttatgcaaaaataatctgtaatactaaagacaatgaacgtgttgtgggctttcacgtactgggtccaaatgctggagaagttacacaaggctttgcagctgcgctcaaatgtggactgaccaaaaagcagctggacagcacaattggaatccaccctgtctgtgcagaggtattcacaacattgtctgtgaccaagcgctctggggcaagcatcctccaggctggctgctgaggttaagccccagtgtggatgctgttgccaagactgcaaaccactggctcgtttccgtgcccaaatccaaggcgaagttttctagagggttcttgggctcttggcacctgcgtgtcctgtgcttaccaccgcccaaggcccccttggatctcttggataggagttggtgaatagaaggcaggcagcatcacactggggtcactgacagacttgaagctgacatttggcagggcatcgaagggatgcatccatgaagtcaccagtctcaagcccatgtggtaggcggtgatggaacaactgtcaaatcagttttagcatgacctttccttgtggattttcttattctcgttgtcaagttttctagggttgaatttttttcttttttctccatggtgttaatgatattagagatgaaaaacgttagcagttgatttttgtccaaaagcaagtcatggctagagtatccatgcaaggtgtcttgttgcatggaagggatagtttggctcccttggaggctatgtaggcttgtcccgggaaagagaactgtcctgcagctgaaatggactgttctttactgacctgctcagcagtttcttctctcatatattcccaaaacaagtacatctgcgatcaactctagccaaatttgcccctgtgtgctacatgatggatgattattattttaaggtctgtttaggaagggaaatggctacttggccagccattgcctggcatttggtagtatagtatgattctcaccattatttgtcatggaggcagacatacaccagaaatgggggagaaacagtacatatctttctgtctttagtttattgtgtgctggtctaagcaagctgagatcatttgcaatggaaaacacgtaacttgtttaaaagtttttctggtagctttagctttatgctaaaaaaaataatgacattgggtatctatttctttctaagacatacattagtaggaaaataagtcttttcatgcttatgatttagctgttttgtggtaattgctttttaaaggaagttattaatatcataagttattattaatattttgaacacaggtggatgtgaaggattttcatttaaaaaccaagtggttttgactttttctgttgaatgaacaactgtgccttgtggaatttttgcagaagtgtttatgctttgttagcatttcaacttgcattattataaagaggtattaatgcctcagttatgtgtttgtcaatgtactggctgaggattctatctcagctgtcttttctaactgtgtaggttgagttttgaacacgtgcttgtggacatcagcctcctgccagcagttcttgaagcttctttttcattcctgctactctacctgtatttctcagttgcagcactgagtggtcaaaatacatttctgggccacctcagggaacccatgcatctgcctggcatttaggcagcagagcccctgaccgtcccccacaggctctgcctcacgtcctcatctcatttggctgtgtaaagaaatgggaaaagggaaaaggagagagcaattgaggcagttgaccatattcagttttatttatttatttttaatttgtttttttctccaagtccaccagtctctgaaattagaacagtaggcggtatgagataatcaggcctaatcatgttgtgattctcttttcttagtggagtggaatgttctatccccacaagaaggattatatcttatagacttgtcttgttcagattctgtatttacccattttattgaaacatatactaagttccatgtatttttgttacaaatcttctgaaaaaaaacaaaacaatgtgaaacattaaaattaaaaggcattaataataaaaaaaaaaaaaaaaacccgaattc

SEQ ID NO: 228 - DNA, 1656 bp, Homo sapiens
cgcccctgctctcgcgccggcgtcggctgcgtctccggcgtttgaattgcgcttccgccatctttccagcctcagtcggacgggcgcggaggcgcttctggaaggaacgccgcgatggctgcgcagggagagccccaggtccagttcaaacttgtattggttggtgatggtggtactggaaaaacgaccttcgtgaaacgtcatttgactggtgaatttgagaagaagtatgtagccaccttgggtgttgaggttcatcccctagtgttccacaccaacagaggacctattaagttcaatgtatgggacacagccggccaggagaaattcggtggactgagagatggctattatatccaagcccagtgtgccatcataatgtttgatgtaacatcgagagttacttacaagaatgtgcctaactggcatagagatctggtacgagtgtgtgaaaacatccccattgtgttgtgtggcaacaaagtggatattaaggacaggaaagtgaaggcgaaatccattgtcttccaccgaaagaagaatcttcagtactacgacatttctgccaaaagtaactacaactttgaaaagcccttcctctggcttgctaggaagctcattggagaccctaacttggaatttgttgccatgcctgctctcgccccaccagaagttgtcatggacccagctttggcagcacagtatgagcacgacttagaggttgctcagacaactgctctcccggatgaggatgatgacctgtgagaatgaagctggagcccagcgtcagaagtctagttttataggcagctgtcctgtgatgtcagcggtgcagcgtgtgtgccacctcattattatctagctaagcggaacatgtgctttatctgtgggatgctgaaggagatgagtgggcttcggagtgaatgtggcagtttaaaaaataacttcattgtttggacctgcatatttagctgtttggacgcagttgattccttgagtttcatatataagactgctgcagtcacatcacaatattcagtggtgaaatcttgtttgttactgtcattcccattccttttctttagaatcagaataaagttgtatttcaaatatctaagcaagtgaactcatcccttgtttataaatagcatttggaaaccactaaagtagggaagttttatgccatgttaatatttgaattgccttgcttttatcacttaatttgaaatctattgggttaatttctccctatgtttatttttgtacatttgagccatgtcacacaaactgatgatgacaggtcagcagtattctatttggttagaagggttacatggtgtaaatattagtgcagttaagctaaagcagtgtttgctccaccttcatattggctaggtagggtcacctagggaagcacttgctcaaaatctgtgacctgtcagaataaaaatgtggtttgtacatatcaaatagatattttaagggtaatattttcttttatggcaaaagtaatcatgttttaatgtagaacctcaaacaggatggaacatcagtggatggcaggaggttgggaattcttgctgttaaaaataattacaaattttgcactttttgtttgaatgttagatgcttagtgtgaagttgatacgcaagccg

SEQ ID NO: 229 - DNA, 5296 bp, Homo sapiens
gcgcgagttgctgctaacgctcctcctccagcttcccacccccgccgcccgccgcggcccggtaccaacgggtggtctcgccgagggagctgtcgtgcctcgtggtcccgggactgcagtggtgtgcgctctcggcgcgtggcgctaggcatggcgatggatcaagtaaacgcgctgtgcgagcagctggtgaaagcggtgacggtcatgatggaccccaactccacccagcgctaccggctggaagccctcaagttttgtgaggagtttaaagaaaagtgtcctatctgtgtcccctgtggcttgaggttggctgagaaaacacaagttgccatcgtcagacattttggccttcagatcctggaacacgttgtcaagtttcggtggaacggcatgtctcgattggagaaggtgtatctgaagaacagtgtcatggagctgattgcaaatggaacattgaacattttggaagaggagaaccatattaaagatgctctgtctcgaattgtagtggaaatgatcaagcgagagtggccacagcattggcctgacatgctaatagaattggacactctttccaaacaaggggaaacacagacagaattggtgatgtttatccttttgcgactggcagaggatgtagtgacttttcagacacttccccctcaaagaagaagggacatccagcaaacattaacccagaacatggaaaggatcttcagttttctgcttaacacacttcaagaaaatgtaaacaagtatcagcaagtgaagacagatacttctcaggagtcaaaggcgcaagcaaactgtcgagtaggagttgcagcactgaatactctagcaggctatattgactgggtgtctatgagtcacatcactgctgaaaactgtaaactcctggagatactgtgtttgctgttgaatgaacaggaacttcagttgggagccgctgagtgtcttctcattgcagtcagcagaaaaggcaagttggaagaccggaagcccttgatggtcttatttggagatgttgccatgcattatatactctccgccgcacagactgctgatggaggaggtttggtagaaaaacactacgtctttctgaagaggctctgtcaggtgttgtgtgcgctgggcaatcagctgtgtgcattgctgggtgcagattctgatgtagaaacaccatcaaactttggaaaatacctggaatcttttcttgctttcacaacccatccaagtcagtttctacgctcttcaactcagatgacttggggagccctcttcaggcatgaaatcctgtcccgtgatcctttgctattagcaataataccaaaatatcttcgtgcttccatgactaacttggtcaagatgggctttccttctaaaacagacagccctagctgtgaatattctcggtttgattttgatagcgatgaggacttcaatgctttcttcaactcctcccgagcacaacaaggagaggtgatgaggttggcatgtcgtttggatcccaaaactagcttccagatggctggggagtggctaaagtatcaactatcaacttttcttgatgctggttctgtgaattcttgttctgcagttggaactggagaaggaagcctctgttccgtcttctcaccttcattcgtgcagtgggaagccatgactctttttttggaaagtgttatcacccagatgtttcgaacactaaatagagaagaaattcctgttaatgatggaatagagctattgcagatggttctgaactttgataccaaggatcccctcatcctgtcctgcgtccttactaatgtctctgcactctttccatttgtcacctacagaccagagttcctgccccaggtcttctctaagctattttcatctgtcacttttgaaactgttgaagaaagtaaggcccccagaacccgggcagtgaggaatgtgaggaggcatgcttgttcctccatcatcaagatgtgtcgtgactacccccagcttgtgctgcccaattttgacatgctttataaccatgtgaagcaactcctctccaatgagctactcctgacacaaatggagaagtgtgccctcatggaagccctggttctcattagcaaccaatttaagaactacgagcgtcagaaggtgttcctagaggagctgatggcaccagtggccagcatctggctttctcaagacatgcacagagtgctgtcagatgttgatgctttcattgtgtatgtgggtacagatcagaagagctgtgacccaggcctggaggatccgtgtggcttaaaccgtgcacgaatgagcttttgtgtatacagcattctgggtgtggtgaaacgaacttgctggcccactgacctagaagaggccaaagctgggggatttgtggtgggttatacatccagtggaaatccaatcttccgtaacccctgcacagagcagattctgaaacttcttgacaatttgcttgcgcttataagaacccacaatacattatatgcaccagaaatgctagccaaaatggcagagcctttcaccaaggctctggatatgcttgacgcggaaaaatctgctatattaggattacctcaacctctcttggaactcaatgactctcctgtcttcaaaaccgtcttggaaagaatgcagcgtttcttctctaccctctatgaaaactgttttcatatcctagggaaggcaggcccttccatgcagcaagacttctatactgtggaggaccttgctacccagcttctcagctcagcctttgtcaacttgaacaatattcctgactaccgactcagacccatgcttcgtgtctttgtaaagcctctggtgctcttctgtcccccagagcactatgaagccctggtatcccccatcctcggacctcttttcacctacctccatatgaggctttctcagaaatggcaagttatcaaccaaaggagcctgctgtgtggagaagatgaggctgcagatgaaaacccagagtctcaagagatgctggaggagcaactggtgaggatgttaacccgagaagtcatggacctaatcacggtttgctgtgtttcaaagaagggtgctgaccacagtagtgctcccccagcagatggagacgatgaagaaatgatggccacagaggtcaccccctcagctatggcagagcttacagacctgggcaaatgtctgatgaagcatgaggatgtttgtacagcgctattaattacagccttcaattccctggcctggaaagatactctgtcctgccagaggacaacctcacagctctgctggcctctcctcaaacaagtgctgtcagggacactgctcgcagatgcagttacgtggcttttcaccagtgtgctgaaaggcttacagatgcacgggcagcacgacgggtgcatggcttccctggtccatctggccttccagatatacgaggcactgcgccccaggtacctggagataagagctgtaatggagcaaatccctgaaatacagaaggactcactggaccagtttgactgcaagcttttaaacccctccctgcagaaagtggctgacaagcgccgaaaggaccaattcaaacgcctcattgctggttgcattgggaaacccttgggagagcagttccgaaaagaagttcacattaagaatcttccctcacttttcaaaaaaacaaagccaatgctggagacggaggtgctggacaatgatgggggtggcctggccaccatctttgaaccctgaatcaagcttttgggcatccttcctcggcctttcttgtcatctcttctttccctttgtagccgatctctaggcccttcttgcactgccacctcactttccaccactgtcagcctggaaagagatccaggtctggagctggagagaacaggccctgtgcaggaccagaagtaattatactaaagtatcaagaaagggagttagggcttaaactattctgtctagatgtcccagatagttcccattctacttggagatttggcttttccaagaaaagctagagcagagcagcccttctcccacaagccctcccacccccgtgcagccacatacctgtacagaatggtaactaagggtgctgtgcccaaccctgcgactagcaaggctcgcagcaagagcacagccctcaactacttgtgccagagtttctcttggaccactccaactcccactgagcccttttgctgctgggctggcaggaaactttccccactccctaaggggcatgtctgggttaggtgctaagtgctgaagagaacttggtcagttctctcaactttgctttgggcaagaatctggtcacctgatgggatccatggtacaggctactgctaaacttggcacagtatcaagtatagtacctccaaggaccagggctgggaagtctttagtgctaacatcccctttagagttcacacatcttgcccttccatgaatgacccctcagtctggcctccccagcctcaaggtccactcaggcacaagagccacagtaccctagatagtgtcacatgacaccgttgtcatccaaggataatacagaccaactaggctacatctgtgatgagcagctagcaaagccgctggtcttctcctaggactaagtccaggtgccttccacaatctcatggtctttcaggtccctggttacttttctcaaaggccatttccaaaagaatacatgccttcacatcacaacctgtactgtgagtccattctagaggtcactgaaaggccctgtaaagagaggacatggatacgggacctggccctgaggttattactggccgtaaggcagagttaatccatacagaaaccagtgtgtccatgtgctctgcacaaaaacagacctgttgtccatccagtccactgacaagagggtttccccgagagccgaagtggactgaagctacagtttttagctggtgcgggccacaggcagggtcagattgagaagaagcaaagctggggaagcagaagttgggagtcttgtgttgctccctcttcctgtgtggtgctctgggtttctgtggatcgtgaaggcgatctcaagagtgtttccctccaaacctgatagctgcctattcctgtctggttggggctgtggaggatgtagttgtatttattgcattgtaatatttttaacatcctgtgacttcatgctagaaattttctattgtttatagaaactttttgtagaaacattaactctaaagcacatctgcatgtcagtaaaaatctcagtttcgtacag

SEQ ID NO: 230 - DNA, 3548 bp, Homo sapiens
tggccgaagcagggggacagcaagggacgctcaggcggggaccatggcggacggcggctcggagcgggctgacgggcgcatcgtcaagatggaggtggactacagcgccacggtggatcagcgcctacccgagtgtgcgaagctagccaaggaaggaagacttcaagaagtcattgaaacccttctctctctggaaaagcagactcgtactgcttccgatatggtatcgacatcccgtatcttagttgcagtagtgaagatgtgctatgaggctaaagaatgggatttacttaatgaaaatattatgcttttgtccaaaaggcggagtcagttaaaacaagctgttgccaaaatggttcaacagtgctgtacttatgttgaggaaatcacagaccttcctatcaaacttcgattaattgatactctacgaatggttaccgaaggcaagatttatgttgaaattgagcgtgcgcgactgactaaaacattagcaactataaaagaacaaaatggtgatgtgaaagaggcagcctccattttacaggagttacaggtggaaacctacgggtcaatggaaaagaaagagcgagtggaatttattttggagcaaatgaggctctgcctagctgtgaaggattacattcgaacacaaatcatcagcaagaaaattaacaccaaatttttccaggaagaaaatacagagaaattaaagttgaagtactataatttaatgattcagctggatcaacatgagggatcctatttgtctatttgtaagcactacagagcaatatatgatactccctgtatacaggcagaaagtgaaaaatggcagcaggctctgaagagtgttgtactctatgttatcctggctccttttgacaatgaacagtcagatttggttcaccgaataagtggtgacaagaagttagaagaaattcccaaatacaaggatcttttaaagctttttaccacaatggagttgatgcgttggtccacacttgttgaggactatggaatggaattaagaaaaggttcccttgagagtcctgcaacggatgtttttggttctacagaggaaggtgaaaaaaggtggaaagacttgaagaacagagttgttgaacataatattagaataatggccaagtattatactcggataacaatgaaaaggatggcacagcttctggatctatctgttgatgagtccgaagcctttctctcaaatctagtagttaacaagaccatctttgctaaagtagacagattagcaggaattatcaacttccagagacccaaggatccaaataatttattaaatgactggtctcagaaactgaactcattaatgtctctggttaacaaaactacgcatctcatagccaaagaggagatgatacataatctacaataagggtcttagtgctttagaaaaaagttaaaattggaagtcattaaaaaaagactgttataatggtgtatatgttggggttttttttctaagcttctttgtcttaaattttaaaatagtgaatatgtttgagactccctttgacctttcagttccccaagttcattgttaactttgcatttgcaattggtgcaaaaatacagatttctgtcgtctgaatacacaaaaagttgtgtcataacttacccagatatgtttttctatcatttgaaacctttttagctactgtttgttttcattcaactaacaaacatattccaataataaaagcagtatatacatatttcctttctacagttacctctgattctcaacattttgtggggtagtgatttggcaagtgttttttaaataaaacaaatctcattgtaaagttatcagtcatttagtagaatagaaaagcaacatagagcatacaagaacatttgggatagagttgtgatttgtgaagaatttgtactttgatattgtggcggaaagtctagactgagtgtgtatgctggtaaactgtagacttttttttttttttttgagtccggctggttccaatcacagtagcttgattgctttcagccctcatcctctcacttgatcagttgttcaacagaatcagctgacataattgacacagtttattgggtgttaagtccgctctatagggatagtgactacttttttttttttttttttttttgctcttcttcctctcccctttctttatatgggtttaaatttaacataaagttgtttttataaggcttatttgtggctttaacttgtaagtctgattacatcattattgttccaaattcattatctctgtaggaacttttagttccattatatgaacactggataacctaattttttttaatgctttaaaaaaatggcaaaaagacgtcaggccaccctcatagtaagtggtgtagtattaaaatattttcacggaattaaaagtagcttgctgtcaaagaaacacctgagatgaattggtgtgaacgaattttgcaagtttaatttgatttatttcagagaaaatagaaaaaacaatgttagaaggttatttaaaatgatacttaaataaagaaagtgtgaggtctactttaaaaaaattcaaatgaagagaaaaagaaaaacagcattctagaaatggcatttctcctaattaattttccacttaatggaagattatcaattgtcctattttatgatcccaggactgaagacagttgtgggatatctgtcatatttatcctgtgagtcattgtgaataatgacatacagtactgaagtaatctgattttattctttggaaattcaatgcattggtcacactaataacatcaacatctgctatcacttatctttttaaaactaaccaaaaaaggctgggattacaggcatgagccactgcacccaactcctctttcgtctttctttaacacacactaggctctttgtgtattatgattcagtgctatttgtaactgtgtcccagtgaccaaattgcactcgactcgatcagctgttcatccatttcgtgttttttcctgtcaaacattaatccagcaaatatatgaggtatttaccaatttattttcttagtattacaaaataattcattagcataaagtacaatagtgaaatatttgagttgttcggaacctcaattaatcctgttttacatttcagacctaaagctggcaatcaggagaagaagcactttgttttaaatgtggagaagataacacttgattccatttcattgtcattagtgtattaaccagcaggagaggtgatgagccatttttcaaatgaaataccttttatttccatataatttttttattttagagttcaatagctgtttctatgattatcctcaatttccatatgttactgaatctgaaaaacatctttaaaattcaaacagttccattttctctcttgtaagtgttaaatgtgataaaagtacatattttaaattgttttcagctcttggatatagcagcaataaaaacactaatttgtgggtatttaagaaaacctggagaataaactcatactttaaaagatc

SEQ ID NO: 231 - DNA, 4471 bp, Homo sapiens
ttcggtggcctctagtgagatctggaggatccaaggattctgtagctacaatgttgtcaagactttttcgaatgcatggcctctttgtggcctcccatccctgggaagtcatagtggggacagtgacactgaccatctgcatgatgtccatgaacatgtttactggtaacaataagatctgtggttggaattatgaatgtccaaagtttgaagaggatgttttgagcagtgacattataattctgacaataacacgatgcatagccatcctgtatatttacttccagttccagaatttacgtcaacttggatcaaaatatattttgggtattgctggccttttcacaattttctcaagttttgtattcagtacagttgtcattcacttcttagacaaagaattgacaggcttgaatgaagctttgccctttttcctacttttgattgacctttccagagcaagcacattagcaaagtttgccctcagttccaactcacaggatgaagtaagggaaaatattgctcgtggaatggcaattttaggtcctacgtttaccctcgatgctcttgttgaatgtcttgtgattggagttggtaccatgtcaggggtacgtcagcttgaaattatgtgctgctttggctgcatgtcagttcttgccaactacttcgtgttcatgactttcttcccagcttgtgtgtccttggtattagagctttctcgggaaagccgcgagggtcgtccaatttggcagctcagccattttgcccgagttttagaagaagaagaaaataagccgaatcctgtaactcagagggtcaagatgattatgtctctaggcttggttcttgttcatgctcacagtcgctggatagctgatccttctcctcaaaacagtacagcagatacttctaaggtttcattaggactggatgaaaatgtgtccaagagaattgaaccaagtgtttccctctggcagttttatctctctaaaatgatcagcatggatattgaacaagttattaccctaagtttagctctccttctggctgtcaagtacatcttctttgaacaaacagagacagaatctacactctcattaaaaaaccctatcacatctcctgtagtgacacaaaagaaagtcccagacaattgttgtagacgtgaacctatgctggtcagaaataaccagaaatgtgattcagtagaggaagagacagggataaaccgagaaagaaaagttgaggttataaaacccttagtggctgaaacagataccccaaacagagctacatttgtggttggtaactcctccttactcgatacttcatcagtactggtgacacaggaacctgaaattgaacttcccagggaacctcggcctaatgaagaatgtctacagatacttgggaatgcagagaaaggtgcaaaattccttagtgatgctgagatcatccagttagtcaatgctaagcatatcccagcctacaagttggaaactctgatggaaactcatgagcgtggtgtatctattcgccgacagttactttccaagaagctttcagaaccttcttctctccagtacctaccttacagggattataattactccttggtgatgggagcttgttgtgagaatgttattggatatatgcccatccctgttggagtggcaggacccctttgcttagatgaaaaagaatttcaggttccaatggcaacaacagaaggttgtcttgtggccagcaccaatagaggctgcagagcaataggtcttggtggaggtgccagcagccgagtccttgcagatgggatgactcgtggcccagttgtgcgtcttccacgtgcttgtgactctgcagaagtgaaagcctggctcgaaacatctgaagggttcgcagtgataaaggaggcatttgacagcactagcagatttgcacgtctacagaaacttcatacaagtatagctggacgcaacctttatatccgtttccagtccaggtcaggggatgccatggggatgaacatgatttcaaagggtacagagaaagcactttcaaaacttcacgagtatttccctgaaatgcagattctagccgttagtggtaactattgtactgacaagaaacctgctgctataaattggatagagggaagaggaaaatctgttgtttgtgaagctgtcattccagccaaggttgtcagagaagtattaaagactaccacagaggctatgattgaggtcaacattaacaagaatttagtgggctctgccatggctgggagcataggaggctacaacgcccatgcagcaaacattgtcaccgccatctacattgcctgtggacaggatgcagcacagaatgttggtagttcaaactgtattactttaatggaagcaagtggtcccacaaatgaagatttatatatcagctgcaccatgccatctatagagataggaacggtgggtggtgggaccaacctactacctcagcaagcctgtttgcagatgctaggtgttcaaggagcatgcaaagataatcctggggaaaatgcccggcagcttgcccgaattgtgtgtgggaccgtaatggctggggaattgtcacttatggcagcattggcagcaggacatcttgtcaaaagtcacatgattcacaacaggtcgaagatcaatttacaagacctccaaggagcttgcaccaagaagacagcctgaatagcccgacagttctgaactggaacatgggcattgggttctaaaggactaacataaaatctgtgaattaaaaaagctcaatgcattgtcttgtggaggatgaataaatgtgatcactgagacagccacttggtttttggctctttcagagaggtctcaggttctttccatgcagactcctcagatctgaacacagtttagtgctttacatgctgtgctctttgaagagatttcaacaagaatattgtatgttaaagcatcagagatggtaatctacagctcacctctgaaagcaaatataagctgggaaaaaagttttgatgaaattcttgaagttcatggtgatcagtgcaattgaccttctccctcactcctgccagttgaaaatggatttttaaattatactgtagctgatgaaactcctgattttgtagttaatttattaagtctgggatgtagaacttcaagaagtaagagctaagttctaagttcatgtttgtaaattaatacttcatttggtgctggtctattttgattttggggggtaatcagcattattcttcagaaggggacctgttttcttcaagggaagaaacactcttattcccaaactacagaataatgtgttaaacatgctaaatagttctatcaggaaaacaaatcactgtatttatctccgcaggctatttgttcagagaggccttttgtttaaatataaatgtttaaatataaatgtttgtctggattggctataacatgtctttcagcattaggcttttaagaaacacagggttttgtattctttactaaagatatcagagctcttaatgttgcttagatgagggtgactgtcaagtacaagcaagactgggaccttagaaatcattgtagaaacacagttttgaaagatttttaccatgtctctaagccaactttaattgcttaaaagacatttttatttagttgaaaaatctagttttttttgtaaactgtaccaaatctgtatatgttgtaataaaacttatgctagtttattggaagtgttcaagaaataaaaatcaacttgtgtactgataaaatactctagcctgggccagagaagataatgttctttaatgttgtcaggaaaccctggcttgcttgccgagcctaatgaaagggaaagtcagctttcagagccagtgaaggagccacgtgaatggccctagaactgtgcctagttcctgtggccaggaggttggtgactgaaacattcacacagggctcttggatggacccacgaacgctcttagctttctcagggggtcagcagagttattgaatcttaattttttttaatgtacaagttttgtataaataataaagaactccttattttgtattacatctaatgcttaagtgttgctcttggaaagctgatgatgtctcttgtagagatgactctgaaaaacattccaggaaaccatggcagcatggagagcctcttagtgattgtgtctgcattgttattgtggaagatttaccttttctgttgtacgtaaagcttaaattacttttgttgtgactttttagccagtgactttttctgagcttttcatggaagtggcagtgaaaaatatgttgagtgttcaaaaaagtgactgtaattaatatcttgctggattaatgttttgtacaattactaaattgtatacattttgttatagaatacttttttctagtttcagtaaataatgaaaaggaagttaatacca

SEQ ID NO: 232 - DNA, 1273 bp, Homo sapiens
caagatggcggcagctgcggcttcgcttcgcggggtagtgttgggcccgcggggcgcggggctcccgggcgcgcgtgcccggggtctgctgtgcagcgcgcggcccgggcagctcccgctacggacacctcaggcagtggccttgtcgtcgaagtctggcctttcccgaggccggaaagtgatgctgtcagcgctgggcatgctggcggcagggggtgcggggctggccgtggctctgcattcggctgtgagtgccagtgacctggagctgcacccccccagctatccgtggtctcaccgtggcctcctctcttccttggaccacaccagcatccggaggggtttccaggtatataagcaggtgtgcgcctcctgccacagcatggacttcgtggcctaccgccacctggtgggcgtgtgctacacggaggatgaagctaaggagctggctgcggaggtggaggttcaagacggccccaatgaagatggggagatgttcatgcggccagggaagctgttcgactatttcccaaaaccataccccaacagtgaggctgctcgagctgccaacaacggagcattgccccctgacctcagctacatcgtgcgagctaggcatggtggtgaggactacgtcttctccctgctcacgggctactgcgagccacccaccggggtgtcactgcgggaaggtctctacttcaacccctactttcctggccaggccattgccatggcccctcccatctacacagatgtcttagagtttgacgatggcaccccagctaccatgtcccagatagccaaggatgtgtgcaccttcctgcgctgggcatctgagccagagcacgaccatcgaaaacgcatggggctcaagatgttgatgatgatggctctgctggtgcccctggtctacaccataaagcggcacaagtggtcagtcctgaagagtcggaagctggcatatcggccgcccaagtgaccctgtccagtgtctgcttgccatcctgccagaacaggccctcaagcccaagagccatcccaggcctgttcaggcctcagctaagcctctcttcatctggaagaagaggcaagggggcaggagaccaggctctagctctgggccctccttcagcccccatcatgggaataaattaattttctcaatgtaaaaaaaaaaaaaaaaaaaaaaaaaaaaaaaaaaaaaaaaaaaaaaaaaaaaaaaaaaaaaaaaaaaaaaaaaaaaaaaaaaaaaaaaaaaaaaaaaaaaaaa

SEQ ID NO: 233 - DNA, 5719 bp, Homo sapiens
atgggtgaggaggggccccccagcctggagtacatccaagccaaggatctgttcccccccaaggaactagtgaaggaggaagagaatcttcaggtccccttcacagtgctgcagggtgagggagtagagttcctgggccgggcagccgatgccctcattgccatctctaactaccggctgcatatcaaattcaaggactctgtcatcaacgtccccctccggatgattgacagtgtggagagccgtgatatgttccagttgcacatttcctgcaaggactccaaagtggtgaggtgccacttctccacttttaagcagtgccaagagtggctctcacggctaagccgagccacagcaagacctgccaagcctgaagacctctttgcctttgcctaccatgcctggtgcctggggctgaccgaggaggaccagcacactcacctatgtcagccaggtgagcacatacgttgtcgacaggaggcggagcttgcaaggatgggctttgacgtgcagaacgtctggagagtctcacacatcaacagcaactacaaattgtgccccagttacccccagaagctgctggttcctgtgtggatcactgacaaagagctggagaacgtggcttccttccgctcctggaagcggattcccgtggttgtgtatagacacttgcgcaatggggctgccatcgcccgctgcagccagccagagatcagctggtggggctggcgcaatgctgatgatgagtacctggtcacgtccattgctaaagcctgtgccctggacccggggacaagggccactgggggctccctcagcaccgggaataatgataccagcgaggcgtgtgatgctgactttgattcttctctgactgcgtgctctggagtggagagcacagcagctcctcaaaagctgctgatcctggatgcgcgatcctacacggcagcagtggccaaccgggccaagggtggaggctgtgaatgtgaagagtactatcccaactgtgaggtcgtgttcatgggaatggccaacatccatgccatccggaacagctttcagtacctccgggctgtgtgtagccagatgccggatcctagcaactggttgtcggcactggagagtaccaaatggctgcagcacttgtcggtgatgctaaaagcagctgtgctggtggctaatacagtagaccgggaaggccggcctgtgctggtacactgctcagatggctgggaccgcacaccgcagatcgtagccctggccaaaatattactggacccatattacaggacgttggagggcttccaagtgttagtggagtctgactggctggattttgggcacaagtttggagatcgctgtggccaccaagagaatgtggaggaccaaaacgaacaatgccctgtgttcctccagtggcttgattctgttcatcagttgcttaagcagttcccctgcctgtttgaatttaatgaagcattcctggtaaaactggtgcaacacacatactcctgcctctacggcaccttcctggccaacaacccctgtgagcgagagaagcgcaacatctacaagcggacctgctctgtgtgggcgctccttcgagctggcaataaaaactttcataacttcctctacacacccagctcagacatggtcctgcatcctgtttgtcatgtccgggccctgcacctctggacagctgtttatctgccagcatcatctccatgcacacttggggaagaaaacatggatctttacctttccccagtggcccagagccaggagttctctggccgctctctggacagattacctaaaaccagatccatggatgatcttctttctgcctgtgacacaagcagccccctgactcgtacatccagtgaccctaacctgaataaccactgtcaggaggtcagggtaggcctggagccctggcacagcaatcctgagggatcagagacaagctttgtggactctggggtaggagggcctcagcaaactgtaggagaagtgggtcttcctcctcctctgcccagcagccagaaagactacttgagcaataaacctttcaagagtcacaaaagctgttctccaagttacaaactgcttaataccgcagtgcctcgggaaatgaagagcaacacctctgatcctgagatcaaagtcctagaagagactaagggaccagctccagacccttctgcccaggatgagctgggtaggactttagatggcataggggagccacctgaacattgtcctgaaacagaagctgtcagtgcactctccaaggtcatttctaacaagtgtgatggagtttgtaattttcctgagtcttcccagaactctcctacaggtacgccccaacaggcccagccagactccatgctaggtgtgccctccaagtgtgttcttgatcacagcctcagcaccgtttgcaacccaccgagtgctgcctgccaaactcctctagacccaagcactgacttcctcaaccaagatccctcagggtctgtggcaagtatctcccaccaggaacaactgagttctgtgccggatctgacccatggggaggaagacattggtaaaagaggaaataataggaatgggcagttattggaaaatcctcgctttgggaaaatgccattggaattggtccggaagccaatttctcagagccagatcagtgagttctcttttctagggtccaactgggacagcttccaagggatggtgacttcattcccaagtggggaggccacccctcggcggctgctttcctatggctgttgtagcaagaggccaaacagtaagcagatgcgggccacagggccctgctttgggggccagtgggctcagagagaaggtgtgaagtcacctgtctgttctagtcattccaatggacattgtactggcccaggaggaaagaaccagatgtggttgtccagtcatccaaagcaagtctctagcacaaagcccgttccactgaactgcccttctccagtgcctcctctgtatttggatgatgatggactcccctttcccacggatgtgatccagcataggttacggcaaatcgaagcagggtacaaacaagaggtggagcagctacgtcgacaggtgcgtgagcttcagatgaggctggacatccgtcactgctgtgcccctccagcagagccccccatggactatgaggatgattttacatgtttgaaggagtcagatggcagtgatactgaggattttggctctgatcacagtgaagactgcctttcagaagcaagctgggaacctgttgataagaaagagactgaggtgactcgctgggttccagaccatatggcatcacactgctataactgtgactgtgaattctggttggccaaacgaagacaccattgcagaaattgtgggaatgtattttgtgctggatgctgccacctgaagctgcccattcctgatcagcaactctatgacccagttctcgtctgtaactcatgttacgaacacattcaagtctctcgtgccagggaactcatgagccaacagctgaagaaacccattgctacagcttccagttgaatgccggggagaaacctgtccaattttagcaggtttgaagggaggatcttcttcagttgtagtttggaaggttccttggtgtggctcatgaaatcacagagctcagagataccatcttgagaaatcctccttggtatcatgaaactggagcagaggaattgcaatttagcaggaggtcctctactggtgataccctcaccttggggtaatggtcctaacccagacccagggtctggaagcttaatgttgagttggtgactccagcctctttctcctggaggtcacaagatgatgattgcgtagatgttgcctggtgcaaagtgccccaaacagcaatagaaagacatatgtataaccaaactccaagtgataaccagacccatctctcctccaccttgacaaaagcagattatagtatacaaggtaggaattcctgtcctatttgagatgaactatatcctgtacctctgtgctctgtgtctgcatgaaggctcagcctttagaggcactccttctagttgcattagtactgtctttctgtggagtttggtttgaagactggctcagcaagtggaggtttcaatgtatttttcagttggctcatcagccagcattggtgaatattcagtttaggggaacagttctagggagtgagacatttttgggagcagaggaaaactctgctgatgttcggtcctggcaaacattgagttattttgagctgtgaaggcagtcgtctctgttacacagtggcagctcttgagttatgcactgtgaagaatgagaagggaaaagcaaaaattatccttgtgaaatatctgctgattgtgccctactctttgcacctgacttttcctagttgtcctggtgctaacacaggagctacaccttgatcctctcctggcatgaaaataaaacaaaggttttcgttgttgttgttccattgcccatttcccccatgttgtctttcccttggctgatgcctcctctgggtcacattgcttcttatcctgaacacttgacaccttgagggtagaatttagcgtttggtttttacctcctagcatatgctgtttggtatgtgagggtttcagtacaaatgctgctgtctatttctgtgcacttaacaatggaacccaaacagaagagaataaagccttgataccaaaattgggaaagaacatgtgtccatttggaccaaacgttgttggtttttaaaaaattttattttgtttttttgtttttgtttttgttttttttcatcttaatatgtaccagtggcacttaaccaaaagatacagtgatatagccatgtactgtgggtgggacagatacagtctccttggcctataatgaaaccactaggactttatacagttttccttaatttgttgacatataaatggtaaattatatttaggcttatcctgttttgaaatgatggtagtcatctttcttactgctactttcatgttgctttctagaaaacagcatttcattccaaaataactaggatctgcatttagaacaagaatcattatttgtcctgaccttttcagtcctacagagacgcatctgtggttcttttgtacttgccatagatgtaacctaaaaagttttggcatatttaggtcagcctagcggaactttttttttcatttaaatggagctgaataatggagattttgtgtctgcaaaattcctgagatcattgaaaaagtaacaagctgttccttgtttctgatacataaaattattttaagcattttatcaatcattaaaatttactgccagttgtgagtggctttttaattaacttgtctttcattgcacttcactctgcctgttttcaaggggagtaagattggtaacatttggggagactgtatctgtctacttagcgtggctgttttgagggactgtcccatcagtgaacaaactgcatggccttggagagagactctgggctcttggctcagatgtgttcatcaaatactcctttcagagctgttgtgggtgtaagtgacatgatgtggccaaaaatccaaactgtgcagttgcgttgtgacaaacatgcaatgtgctgtaaaaattcaatacagtttaaataaaatctctatattagtgctgc

SEQ ID NO: 234 - DNA, 899 bp, Homo sapiens
ctcactcacactgctggaaggttaaagtcgacttcacgctagtttaaggaaatagctgacgctgataaccatgtcccaagcactgctctaagttcccaatgtgtccggaattggtgggttcttggtctcactgacttcaagaatgaagccacggaccctcgcgttttagactatgctaaaaacagcctcaggaccttcagcactgatcaacaatcctgggcatgggctgaccgacagttttcacccagagagtgaagatcatggaggagccatcttaaattccgcccagcgcaggctcccaggaatcctaatgtcacgatctcactgcagccaatgtgacaaacacagcagtaattaagtctagagagctaaacacacctcaaaaagaattgtctcttggtatgagtggaatggaataaaatacatggaaacccacaaaagtttcgaggtgaacatattagcaaaaatgctctagcttatccaagcgacagttcaaagtgtcaaaggacttctagactcccaatctttccaccggcagaaagcaggctcagtagcccaaactggcgcattttaaaatgcccttttcagaagtgtgatggacaaagaaggatgtgtcagtgcaggccagtgtgtgcgggaccaatggcaaactgcagctcctgaactaagaaagactttcatatctttaacaacagaacccggagacactaggaactatgtgatagagactgtatgtgggccacaaagcctaacatatttactgtgtagatctttacagaaaatgtttgccaactcctgtggcactcctgtggcaactcctgctgaagcacttccaggttgcagaaccaaagccttaattccctagcttaaagtaaagggactggcaagtttactccacg

SEQ ID NO: 235 - DNA, 2856 bp, Homo sapiens
tagtcgcgggtccccgagtgagcacgccagggagcaggagaccaaacgacgggggtcggagtcagagtcgcagtgggagtccccggaccggagcacgagcctgagcgggagagcgccgctcgcacgcccgtcgccacccgcgtacccggcgcagccagagccaccagcgcagcgctgccatggagcccagcagcaagaagctgacgggtcgcctcatgctggctgtgggaggagcagtgcttggctccctgcagtttggctacaacactggagtcatcaatgccccccagaaggtgatcgaggagttctacaaccagacatgggtccaccgctatggggagagcatcctgcccaccacgctcaccacgctctggtccctctcagtggccatcttttctgttgggggcatgattggctccttctctgtgggccttttcgttaaccgctttggccggcggaattcaatgctgatgatgaacctgctggccttcgtgtccgccgtgctcatgggcttctcgaaactgggcaagtcctttgagatgctgatcctgggccgcttcatcatcggtgtgtactgcggcctgaccacaggcttcgtgcccatgtatgtgggtgaagtgtcacccacagcctttcgtggggccctgggcaccctgcaccagctgggcatcgtcgtcggcatcctcatcgcccaggtgttcggcctggactccatcatgggcaacaaggacctgtggcccctgctgctgagcatcatcttcatcccggccctgctgcagtgcatcgtgctgcccttctgccccgagagtccccgcttcctgctcatcaaccgcaacgaggagaaccgggccaagagtgtgctaaagaagctgcgcgggacagctgacgtgacccatgacctgcaggagatgaaggaagagagtcggcagatgatgcgggagaagaaggtcaccatcctggagctgttccgctcccccgcctaccgccagcccatcctcatcgctgtggtgctgcagctgtcccagcagctgtctggcatcaacgctgtcttctattactccacgagcatcttcgagaaggcgggggtgcagcagcctgtgtatgccaccattggctccggtatcgtcaacacggccttcactgtcgtgtcgctgtttgtggtggagcgagcaggccggcggaccctgcacctcataggcctcgctggcatggcgggttgtgccatactcatgaccatcgcgctagcactgctggagcagctaccctggatgtcctatctgagcatcgtggccatctttggctttgtggccttctttgaagtgggtcctggccccatcccatggttcatcgtggctgaactcttcagccagggtccacgtccagctgccattgccgttgcaggcttctccaactggacctcaaatttcattgtgggcatgtgcttccagtatgtggagcaactgtgtggtccctacgtcttcatcatcttcactgtgctcctggttctgttcttcatcttcacctacttcaaagttcctgagactaaaggccggaccttcgatgagatcgcttccggcttccggcaggggggagccagccaaagtgataagacacccgaggagctgttccatcccctgggggctgattcccaagtgtgagtcgccccagatcaccagcccggcctgctcccagcagccctaaggatctctcaggagcacaggcagctggatgagacttccaaacctgacagatgtcagccgagccgggcctggggctcctttctccagccagcaatgatgtccagaagaatattcaggacttaacggctccaggattttaacaaaagcaagactgttgctcaaatctattcagacaagcaacaggttttataatttttttattactgattttgttatttttatatcagcctgagtctcctgtgcccacatcccaggcttcaccctgaatggttccatgcctgagggtggagactaagccctgtcgagacacttgccttcttcacccagctaatctgtagggctggacctatgtcctaaggacacactaatcgaactatgaactacaaagcttctatcccaggaggtggctatggccacccgttctgctggcctggatctccccactctaggggtcaggctccattaggatttgccccttcccatctcttcctacccaaccactcaaattaatctttctttacctgagaccagttgggagcactggagtgcagggaggagaggggaagggccagtctgggctgccgggttctagtctcctttgcactgagggccacactattaccatgagaagagggcctgtgggagcctgcaaactcactgctcaagaagacatggagactcctgccctgttgtgtatagatgcaagatatttatatatatttttggttgtcaatattaaatacagacactaagttatagtatatctggacaagccaacttgtaaatacaccacctcactcctgttacttacctaaacagatataaatggctggtttttagaaacatggttttgaaatgcttgtggattgagggtaggaggtttggatgggagtgagacagaagtaagtggggttgcaaccactgcaacggcttagacttcgactcaggatccagtcccttacacgtacctctcatcagtgtcctcttgctcaaaaatctgtttgatccctgttacccagagaatatatacattctttatcttgacattcaaggcatttctatcacatatttgatagttggtgttcaaaaaaacactagttttgtgccagccgtgatgctcaggcttgaaatcgcattattttgaatgtgaagggaa

SEQ ID NO: 236 - DNA, 2699 bp, Homo sapiens
ggcacgaggcaggcggcgaggagagcggtgccttgcagggatgctgcgggcgggagcaccaaccggggacttaccccgggcgggagaagtccacaccgggaccaccatcatggcagtggagtttgacgggggcgttgtgatgggttctgattcccgagtgtctgcaggcgaggcggtggtgaaccgagtgtttgacaagctgtccccgctgcacgagcgcatctactgtgcactctctggttcagctgctgatgcccaagccgtggccgacatggccgcctaccagctggagctccatgggatagaactggaggaacctccacttgttttggctgctgcaaatgtggtgagaaatatcagctataaatatcgagaggacttgtctgcacatctcatggtagctggctgggaccaacgtgaaggaggtcaggtatatggaaccctgggaggaatgctgactcgacagccttttgccattggtggctccggcagcacctttatctatggttatgtggatgcagcatataagccaggcatgtctcccgaggagtgcaggcgcttcaccacagacgctattgctctggccatgagccgggatggctcaagcgggggtgtcatctacctggtcactattacagctgccggtgtggaccatcgagtcatcttgggcaatgaactgccaaaattctatgatgagtgaaccttccccagacttctctttcttattttgtaataaactctctagggccaaaacctggtatggtcattgggaaatgagtgctcagggagatggagcttaggggaggtgggtgcttccctcctagatgtcagcatacactctttcttcttttgtcccaggtctaaaacatctttcctagagaaaacaaaagggactaaactagaaatataaagagccctatacatgacaggtgatcacgtactgaatgattttgtagtacaaacaataaaaattctcattccgcatcatcatgcggtccatgatgatgaggccgcaaaaaaaaaaaaaaaaaaaaaaaactcgagactagttctctctctctccctcgtgccgaattcggcacgaggtgtaatcccagctactcgggaggctgagacagaagaatcacttgagcccaggaggcggaggttgcggtgagcagagattgcgccattgcactccagcctgggcgacaaagcgagactccatctcaaaaaaaacaaaaaaattagcatttacggaattctgaaattttgggctattaaatttctacatcatctaagtgccctcttggcaatctttcacatcctctcatggcatctgatccagaaggctcaaacctgatctgagtactagtgtgttcctcctactcacttctgtttctattaactaataagtgtagtaatgaaagccagtattagggacaaattttacatgactttcttctcaaacctggacctttattgaacctctgcctccctttttcattagtatgaaagtatgtatcttaaagggttgctctacgaattaaatggatcagtaaatataaagaaagcgcctagcaaagtgcctagtacaaaataaacgcccaactgttattgttactattgttttaaattctagtttccttaccccttaacatacattttcagttatacaaaagttgaacgtttccctggagattgccaaaattctctgaacggtttcaagagatctgtcctattcttcacctacacacaaaaaagtactaatcatcacacacaggctacctaagccacctgaccttacctcccattagctgtccctgtaccatctaactaaaatgtacagatacatacttgtggccaggcacggtggctcacgcctgtaatcacagcactttgggaggccaaggcaggcggatcacctgaggtcaggagtttcagactagtctggccaacatggagaaaccccgtttctactaaaaatgcaaaaattagctgggcttggtggtgcacacctgtagtgccagctactcgcgagactgaggcaggagaattgcttgaacccgggaggcgggggttgcagtgagccgagatccggccactacactccagcctgggaaacagagcgatactctgtctcaaaaaaacagaaagacaaaaaaacggatacatactggaaccctgaaaactttttcagtagcatttagaccttctctcatatacagcattgtaaaatccattgctttgcttttagctgcactatgtgccccaatatcatcaaatggcatttggccttctctttacagactgaaaaggcacattacagatcttaaatatgctagtagtagatcaatgggcagtgtgttattcagaatacagtattctgtgatggttttctaatctcagtgacagtaggtggttaaattaaatgtttatggccaggtgcggtggctcacacctataatcccagcactttgggaggccaagccaaggtgggcagatcttttaaggtcaggagttcaagatcagcctgaccaatatggtgaaagcctgtctccactgaaaatacaaaaaattagctgggtgtggtggcgcacccctgtaatctcagctacccgggaggtagagtttgcagtgagcagagattgtgccactgcactccagtctggacgacagagtgagactccatctcaaaaataaaaaaaaaaaaaaaaaaa

SEQ ID NO: 237 - DNA, 3367 bp, Homo sapiens
gaggccgagctcggctgggcttggcgaggctgcagcgcggccaccggcgggagtgcagcggccactgtacccagagattcaaaaccccaaacccgggacttgggggcgctgagccgggccgggaagcagagcctggtcgtgaggaacagccgcccgttgctgtctgcccctttgcggacagcgtctccctcgactccgcttaggaagtggtgggggcggcgtggcccccgtcgggaggcgttcgaacgcccgctaggagagagaaaggattcccctgtgcttggagcccgcactcgggcgcggagggagcggcggcaggctctcgctttcggcaccatgggctgcacgctgagcgccgaggacaaggcggcggtggagcggagtaagatgatcgaccgcaacctccgtgaggacggcgagaaggcggcgcgcgaggtcaagctgctgctgctcggtgctggtgaatctggtaaaagtacaattgtgaagcagatgaaaattatccatgaagctggttattcagaagaggagtgtaaacaatacaaagcagtggtctacagtaacaccatccagtcaattattgctatcattagggctatggggaggttgaagatagactttggtgactcagcccgggcggatgatgcacgccaactctttgtgctagctggagctgctgaagaaggctttatgactgcagaacttgctggagttataaagagattgtggaaagatagtggtgtacaagcctgtttcaacagatcccgagagtaccagcttaatgattctgcagcatactatttgaatgacttggacagaatagctcaaccaaattacatcccgactcaacaagatgttctcagaactagagtgaaaactacaggaattgttgaaacccattttactttcaaagatcttcattttaaaatgtttgatgtgggaggtcagagatctgagcggaagaagtggattcattgcttcgaaggagtggcggcgatcatcttctgtgtagcactgagtgactacgacctggttctagctgaagatgaagaaatgaaccgaatgcatgaaagcatgaaattgtttgacagcatatgtaacaacaagtggtttacagatacatccattatactttttctaaacaagaaggatctttttgaagaaaaaatcaaaaagagccctctcactatatgctatcaagaatatgcaggatcaaacacatatgaagaggcagctgcatatattcaatgtcagtttgaagacctcaataaaagaaaggacacaaaggaaatatacacccacttcacatgtgccacagatactaagaatgtgcagtttgtttttgatgctgtaacagatgtcatcataaaaaataatctaaaagattgtggtctcttttaagttttgcagttcatggtaaaatgcattttcaaaccaaatgagtacttatatatggatctctgtagactagagtcttgcagcaacacagaatgtaatataaggcaaatgcatctgggacttgaccaaagttgttctgttttgtttttttaactgaaagtaacagaaggacctttcttaaatgtgacagatggtcctgcagtgtgaaactgaaggacagtgttaaagctgggctctagtatattgatgatttctgcataagtgtaaatatgcaaatgtatgtatacatgtatttatgactttagttttcgacattatttttaggttttaagagtggcaacttaggattttagggtgatggctttggaaataacataaatataccttgtactgaatgacagactattactacgtttgccagttttaaacagctttatttatgttcatgtcctgtaaatttttaagtacagtaattaatattaggaaacattacagcccttatctagattatatgtatacttgtattaataaaaatgttatttgtacaaacattgcacagactattttaataacatgatttgttctttaaattttatgtgttttattgaaatgttcttaagatgaatacacctgcctttggatcaactatttaaacattgtatgcattttgatttttcctactttaagaaaataaaataatttaattttacattagattccacgttagatttggtttgaaaaactaaaatttcagatttctgaggatatactgtcttagacttattgtacacacttagtttttattcacttgttttcactctgaattttaatatttggctgatatgaatgcattgcctcaaaggtgatgtcatcttaatttttattcactttaaataactacatttttgtttataactaagtttggagggatcctaagagcatttttgtgggtaaaaaaaaaacctgtggacataatgaattttgagacattgattggtgaggcttttatttcccttgaggagtctcttgtacctagcatacatgatagctccttgttgggaagataacaagaaggatctttgaatactctattgctgatataatgcaagatttaaatttatacatataactaatttcaaatgtaattatcacactatgttaaaattacttttttcccttagataattcaaatttctccacttgcttgagattatatcatttctttttcaattatactattatttctgagaatgaaatggacgattacacttagaaaatgagtaatagtgtttaataagtcagtgattatatgtgtgctcaaataagtgttatgtatcagctagatactgagctttgatagaataattttcttttgattattcatgatgtgtcatctctgaccttgtttcagcaaagtaaacagcactccccaccccaccctcatttttttactcatcttggaaaaggttagtctttcagtacacgttactggtaagtagtttccaagttacgtgttgtcactgggttgaagtatatttgtgtgtgtgtgtgtgtgtgtgtgtgtgtgtgtgtgtgtgtaaccataaactatattcatatctgtttcatttggaggattttcttctttgtaatgtaaagaaattcaaagttatcaaagttccttaaatgtgttagtttagattctttatgtgcctttcatgaaagatatgttttcattaattttactggtggacctgtaatatccacattgtgaagctgtgtatgaaattcaactataatatgaataaatttgaatcatgagaattatgggttaaaaagccacaaagaagcacatattggtgaccatcattaatgaaatcctgaactttattctgtgtaattgtgttaataaatcctaataaatttaaatttttaaaattttacaaacaaaaaaaaaaaaaaaaaaaaaaaagaaaaaaaaaaaaaaaaa

SEQ ID NO: 238 - DNA, 6331 bp, Homo sapiens
gtctcctctggatcttaactactgagcgcaatgctgagccatggagccgggttggccttgtggatcacactgagcctgctgcagactggactggcggagccagagagatgtaacttcaccctggcggagtccaaggcctccagccattctgtgtctatccagtggagaattttgggctcaccctgtaactttagcctcatctatagcagtgacaccctgggggccgcgttgtgccctacctttcggatagacaacaccacatacggatgtaaccttcaagatttacaagcaggaaccatctataacttcaagattatttctctggatgaagagagaactgtggtcttgcaaacagatcctttacctcctgctaggtttggagtcagtaaagagaagacgacttcaaccggcttgcatgtttggtggactccttcttccggaaaagtcacctcatatgaggtgcaattatttgatgaaaataaccaaaagatacagggggttcaaattcaagaaagtacttcatggaatgaatacacttttttcaatctcactgctggtagtaaatacaatattgccatcacagctgtttctggaggaaaacgttctttttcagtttataccaatggatcaacagtgccatctccagtgaaagatattggtatttccacaaaagccaattctctcctgatttcctggtcccatggttctgggaatgtggaacgataccggctgatgctaatggataaagggatcctagttcatggcggtgttgtggacaaacatgctacttcctatgcttttcacgggctgtcccctggctacctctacaacctcactgttatgactgaggctgcagggctgcaaaactacaggtggaaactagtcaggacagcccccatggaagtctcaaatctgaaggtgacaaatgatggcagtttgacctctctaaaagtcaaatggcaaagacctcctggaaatgtggattcttacaatatcaccctgtctcacaaagggaccatcaaggaatccagagtattagcaccttggattactgaaactcactttaaagagttagtccccggtcgactttatcaagttactgtcagctgtgtctctggtgaactgtctgctcagaagatggcagtgggcagaacatttccagacaaagttgcaaacctggaggcaaacaataatggcaggatgaggtctcttgtagtgagctggtcgccccctgctggagactgggagcagtatcggatcctactcttcaatgattctgtggtgctgctcaacatcactgtgggaaaggaagaaacacagtatgtcatggatgacacggggctcgtaccgggaagacagtatgaggtggaagtcattgttgagagtggaaatttgaagaattctgagcgttgccaaggcaggacagtccccctggctgtcctccagcttcgtgtcaaacatgccaatgaaacctcactgagtatcatgtggcagacccctgtagcagaatgggagaaatacatcatttccctagctgacagagacctcttactgatccacaagtcactctccaaagatgccaaagaattcacttttactgacctggtgcctggacgaaaatacatggctacagtcaccagtattagtggagacttaaaaaattcctcttcagtaaaaggaagaacagtgcctgcccaagtgactgacttgcatgtggccaaccaaggaatgaccagtagtctgtttactaactggacccaggcacaaggagacgtagaattttaccaagtcttactgatccatgaaaatgtggtcattaaaaatgaaagcatctccagtgagaccagcagatacagcttccactctctcaagtccggcagcctgtactccgtggtggtaacaacagtgagtggagggatctcttcccgacaagtggttgtggagggaagaacagtcccttccagtgtgagtggagtaacggtgaacaattccggtcgtaatgactacctcagcgtttcctggctgctggcgcccggagatgtggataactatgaggtaacattgtctcatgacggcaaggtggttcagtcccttgtcattgccaagtctgtcagagaatgttccttcagctccctcaccccaggccgcctctacaccgtgaccataactacaaggagtggcaagtatgaaaatcactccttcagccaagagcggacagtgcctgacaaagtccagggagtcagtgttagcaactcagccaggagtgactatttaagggtatcctgggtgcatgccactggagactttgatcactatgaagtcaccattaaaaacaaaaacaacttcattcaaactaaaagcattcccaagtcagaaaacgaatgtgtatttgttcagctagtccctggacggttgtacagtgtcactgttactacaaaaagtggacaatatgaagccaatgaacaagggaatgggagaacaattccagagcctgttaaggatctaacattgcgcaacaggagcactgaggacttgcatgtgacttggtcaggagctaatggggatgtcgaccaatatgagatccagctgctcttcaatgacatgaaagtatttcctccttttcaccttgtaaataccgcaaccgagtatcgatttacttccctaacaccaggccgccaatacaaaattcttgtcttgacgattagcggggatgtacagcagtcagccttcattgagggcttcacagttcctagtgctgtcaaaaatattcacatttctcccaatggagcaacagatagcctgacggtgaactggactcctggtgggggagacgttgattcctacacggtgtcggcattcaggcacagtcaaaaggttgactctcagactattcccaagcacgtctttgagcacacgttccacagactggaggccggggagcagtaccagatcatgattgcctcagtcagcgggtccctgaagaatcagataaatgtggttgggcggacagttccagcatctgtccaaggagtaattgcagacaatgcatacagcagttattccttaatagtaagttggcaaaaagctgctggtgtggcagaaagatatgatatcctgcttctaactgaaaatggaatccttctgcgcaacacatcagagccagccaccactaagcaacacaaatttgaagatctaacaccaggcaagaaatacaagatacagatcctaactgtcagtggaggcctctttagcaaggaagcccagactgaaggccgaacagtcccagcagctgtcaccgacctgaggatcacagagaactccaccaggcacctgtccttccgctggaccgcctcagagggggagctcagctggtacaacatctttttgtacaacccagatgggaatctccaggagagagctcaagttgacccactagtccagagcttctctttccagaacttgctacaaggcagaatgtacaagatggtgattgtaactcacagtggggagctgtctaatgagtctttcatatttggtagaacagtcccagcctctgtgagtcatctcagggggtccaatcggaacacgacagacagcctttggttcaactggagtccagcctctggggactttgacttttatgagctgattctctataatcccaatggcacaaagaaggaaaactggaaagacaaggacctgacggagtggcggtttcaaggccttgttcctggaaggaagtacgtgctgtgggtggtaactcacagtggagatctcagcaataaagtcacagcggagagcagaacagctccaagtcctcccagtcttatgtcatttgctgacattgcaaacacatccttggccatcacgtggaaagggcccccagactggacagactacaacgactttgagctgcagtggttgcccagagatgcacttactgtcttcaacccctacaacaacagaaaatcagaaggacgcattgtgtatggtcttcgtccagggagatcctatcaattcaacgtcaagactgtcagtggtgattcctggaaaacttacagcaaaccaatttttggatctgtgaggacaaagcctgacaagatacaaaacctgcattgccggcctcagaactccacggccattgcctgttcttggatccctcctgattctgactttgatggttatagtattgaatgccggaaaatggacacccaagaagttgagttttccagaaagctggagaaagaaaaatctctgctcaacatcatgatgctagtgccccataagaggtacctggtgtccatcaaagtgcagtcggccggcatgaccagcgaggtggttgaagacagcactatcacaatgatagaccgcccccctcctccacccccacacattcgtgtgaatgaaaaggatgtgctaattagcaagtcttccatcaactttactgtcaactgcagctggttcagcgacaccaatggagctgtgaaatacttcacagtggtggtgagagaggctgatggcagtgatgagctgaagccagaacagcagcaccctctcccttcctacctggagtacaggcacaatgcctccattcgggtgtatcagactaattattttgccagcaaatgtgccgaaaatcctaacagcaactccaagagttttaacattaagcttggagcagagatggagagcttaggtggaaaacgcgatcccactcagcaaaaattctgtgatggaccactgaagccacacactgcctacagaatcagcattcgagcttttacacagctctttgatgaggacctgaaggaattcacaaagccactctattcagacacatttttttctttacccatcactactgaatcagagcccttgtttggagctattgaaggtgtgagtgctggtctgtttttaattggcatgctagtggctgttgttgccttattgatctgcagacagaaagtgagccatggtcgagaaagaccctctgcccgtctgagcattcgtagggatcgaccattatctgtccacttaaacctgggccagaaaggtaaccggaaaacttcttgtccaataaaaataaatcagtttgaagggcatttcatgaagctacaggctgactccaactaccttctatccaaggaatacgaggagttaaaagacgtgggccgaaaccagtcatgtgacattgcactcttgccggagaatagagggaaaaatcgatacaacaatatattgccctatgatgccacgcgagtgaagctctccaatgtagatgatgatccttgctctgactacatcaatgccagctacatccctggcaacaacttcagaagagaatacattgtcactcagggaccgcttcctggcaccaaggatgacttctggaaaatggtgtgggaacaaaacgttcacaacatcgtcatggtgacccagtgtgttgagaagggccgagtaaagtgtgaccattactggccagcggaccaggattccctctactatggggacctcatcctgcagatgctctcagagtccgtcctgcctgagtggaccatccgggagtttaagatatgcggtgaggaacagcttgatgcacacagactcatccgccactttcactatacggtgtggccagaccatggagtcccagaaaccacccagtctctgatccagtttgtgagaactgtcagggactacatcaacagaagcccgggtgctgggcccactgtggtgcactgcagtgctggtgtgggtaggactggaacctttattgcattggaccgaatcctccagcagttagactccaaagactctgtggacatttatggagcagtgcacgacctaagacttcacagggttcacatggtccagactgagtgtcagtatgtctacctacatcagtgtgtaagagatgtcctcagagcaagaaagctacggagtgaacaagaaaaccccttgtttccaatctatgaaaatgtgaatccagagtatcacagagatccagtctattcaaggcattgagaatgtacctgaagagctcctggataaaaattattcactgtgtgatttgtttttaaaaacttgcttcatgccctacagaggtgccagctatttctgttgatactatgtataatttattaatctggagaatgtttaaaattttatataatttaaaggtaacagatattattgtacatagttgtattttgtagtttcttctgtaaatatgtatttttcataatgtttaatattaagctttatataatactatttttccacactaaagtgttcatgacttgttctacataaaactaattcaacctgtaaa

SEQ ID NO: 239 - DNA, 661 bp, Homo sapiens
ccggcggtgacaacggcaacatggccctgaacggagctgaagtcgacgacttctcctgggagcccccgactgaggcggagacgaaggtgctgcaggcgcgacgggagcggcaagatcgcatctcccggctcatgggcgactatctgctgcgcggttaccgcatgctgggcgagacgtgtgcggactgcgggacgatcctcctccaagacaaacagcggaaaatctactgcgtggcttgtcaggaactcgactcagacgtggataaagataatcccgctctgaatgcccaggctgccctctcccaagctcgggagcaccagctggcctcagcctcagagctccccctgggctctcgacctgcgccccagcccccagtacctcgtccggagcactgtgagggagctgcagcaggactcaaggcagcccaggggccacctgctcctgctgtgcctccaaatacagatgtcatggcctgcacacagacagccctcttgcagaagctgacctgggcctctgctgaactgggctccagcacctccctggagactagcatccagctgtgtggccttatccgcgcatgtgcggaggccctgcgcagcctgcagcagctacagcactaagagaagcccctgagaaaaaccctctagaaaaacaaaaaaaa

SEQ ID NO: 240 - DNA, 1851 bp, Homo sapiens
ggcacgaggacggggccccggctcagcaccccggagagctccctccccggccttgttttgctctggcatcgccgccgggggagggagcgagggggccgggcaccgggcgcaaaggcagggggatggccatggaagggttgaggggccccgtcggacagagggcccagccgtgatccagcgacgggtttggggctccgggaggggtgggggggcagcgggcggcggcagcagtggccgcacatctggatggaagcgagctttgtccagaccaccatggctctggggctgtcctccaagaaagcgtcctctcgcaacgtggctgtggagcgtaagaacctgatcaccgtgtgcaggttctctgtgaaaacgctgctggagaagtacacagcggagcccatcgatgactcatcggaggagtttgtcaattttgcagccattttagagcagatcctcagccaccgcttcaaagcctgtgccccagcaggtccagtgagctggttcagctcagacgggcagcggggcttttgggactatatccggctggcctgcagcaaagtgcccaacaactgtgtgagcagcatcgagaacatggagaacatcagcacagcccgggccaagggccgggcatggatccgggtggcactgatggagaagcgcatgtcagaatacatcaccacggctctgcgtgacacccggaccaccagacggttctatgactctggagccatcatgctgcgggatgaagccaccatcctcaccggaatgctgatcggactgagcgccatcgacttcagcttctgtctaaagggggaagtcctggacgggaagacccccgtggtcatcgattacacgccctacctaaagttcacgcagagctacgactacctgacggacgaggaggagcggcacagcgccgagagcagcacgagcgaggacaactcgcccgagcacccgtacctcccgctcgtcaccgacgaggacagctggtacagcaagtggcacaagatggagcagaagttccgcatcgtctacgcgcagaagggctacctggaggagctggtgcgtctgcgcgagtcgcagctgaaggacctggaggcggagaaccggcggcttcagctgcagctggaggaggcggcggcgcagaaccagcgcgagaaacgggagctggaaggcgtgatcctggagctgcaggagcagctgacaggtctgatccccagtgaccacgcccctctggcccagggttccaaggagctcactacacccctggtcaatcaatggccctcactgggaacgcttaatggggccgagggcgccagcaactccaagctctaccggagacacagcttcatgagcacggagccgctgtcagctgaagccagtctgagctcggactcccagcgcctgggagagggcacgcgggacgaggagccctggggtcccatcggaagctcagagccaaattagtggctcccttcgagcgaatgcccaggacttcaacgcatgcactttgtgttgacctcatccctggcttcaccttggtttttcccatcctagttctccctatgcctgaatatcctgtcttttcttttttataagcaaccacactgtattggatgaccctagatcttctttgagacaaggcaggctgtggccatgtagccccatcacactgtgtttgtgattgtctgtgtgtctgtctcccccaccagactgtgagctccatgagggcagggaccgtgtcttgtccgttctctgtatccccagtgcttggaacagagcgagtgctcactgtgtatttaataaatggacaaagagagaggatgaccctcaaaaaaaaaaaaaaaaaaaaaa

SEQ ID NO: 241 - DNA, 1231 bp, Homo sapiens
aggtctcagccggtcgtcgcgacgttcgcccgctcgctctgaggctcctgaagccgaaactagctagactttcctccttcccgcctgcctgtagcggcgttgttgccactccgccaccatgttcgaggcgcgcctggtccagggctccatcctcaagaaggtgttggaggcactcaaggacctcatcaacgaggcctgctgggatattagctccagcggtgtaaacctgcagagcatggactcgtcccacgtctctttggtgcagctcaccctgcggtctgagggcttcgacacctaccgctgcgaccgcaacctggccatgggcgtgaacctcaccagtatgtccaaaatactaaaatgcgccggcaatgaagatatcattacactaagggccgaagataacgcggataccttggcgctagtatttgaagcaccaaaccaggagaaagtttcagactatgaaatgaagttgatggatttagatgttgaacaacttggaattccagaacaggagtacagctgtgtagtaaagatgccttctggtgaatttgcacgtatatgccgagatctcagccatattggagatgctgttgtaatttcctgtgcaaaagacggagtgaaattttctgcaagtggagaacttggaaatggaaacattaaattgtcacagacaagtaatgtcgataaagaggaggaagctgttaccatagagatgaatgaaccagttcaactaacttttgcactgaggtacctgaacttctttacaaaagccactccactctcttcaacggtgacactcagtatgtctgcagatgtaccccttgttgtagagtataaaattgcggatatgggacacttaaaatactacttggctcccaagatcgaggatgaagaaggatcttaggcattcttaaaattcaagaaaataaaactaagctctttgagaactgcttctaagatgccagcatatactgaagtcttttctgtcaccaaatttgtacctctaagtacatatgtagatattgttttctgtaaataacctattttttttctctattctctccaatttgtttaaagaataaagtccaaagtctgatctggtctagttaacctagaagtatttttgtctcttagaaatacttgtgatttttataatacaaaagggtcttgactctaaatgcagttttaagaagtgtttttgaatttaaataaagttacttgaatttcaaac

SEQ ID NO: 242 - DNA, 2735 bp, Homo sapiens
ggagggcccggcggcgacagcggaggcagagaggaaggcggttctgagagcttcagagagcgatggaaagcaaaatgggtgaattgcctttagacatcaacatccaggaacctcgctgggaccaaagtactttcctgggcagagcccggcactttttcactgttactgatcctcgaaatctgctgctgtccggggcacagctggaagcttctcggaacatcgtgcagaactacagggccggcgtggtgaccccagggatcaccgaggaccagctgtggagggccaagtatgtgtatgactccgccttccatccggacacaggggagaaggtggtcctgattggccgcatgtcagcccaggtgcccatgaacatgaccatcactggctgcatgctcacattctacaggaagaccccaaccgtggtgttctggcagtgggtgaatcagtccttcaatgccattgttaactactccaaccgcagtggtgacactcccatcactgtgaggcagctggggacagcctatgtgagtgccaccactggagctgtggccacggccctgggactcaaatccctcaccaagcacctgccccccttggtcggcagatttgtgccctttgcagcagtggcagctgccaactgcatcaacatccccctgatgaggcagagagagctgcaggtgggcatcccggtggctgatgaggcaggtcagaggcttggctactcggtgactgcagccaagcagggaatcttccaggtggtgatttcaagaatctgcatggcgattcctgccatggccatcccaccactgatcatggacactctggagaagaaagacttcctgaagcgccgcccctggctgggggcacccctgcaggtgggactggtgggcttctgcctggtatttgcaacccccctgtgctgtgccctattcccccagaagagctccatacacataagcaacctggaaccagagctgagagctcagatccatgagcaaaaccccagcgttgaagtggtctactacaacaaggggctttgaggagggtcagcctctgtcccctccctcacttccttgggctgctgctttagtggagtcatgtcacccctaccacttggctatctgcctagcactgggcaggggccttggtgggcagatggcaattgagggtagcaacctattagggtgggggagggacctccataaggcttttcctcccttctctggtttcaaagatcagagcacataacccctcctgtgcttgagtgtccatgcatatacatacatgatacacatgtgtatgtgtacattgggtcctgaaagctagaagcaggcatgctagcctagtatgttctgacatctggcttcccttctcagcctcatgtccacctgcctgccagccaggctacaggtgtgacttccttctctaaactgttacaccagccaagttatttttgatggcacctcatcccttctagaaataggaggagccccaggatctcaggacagagacttatagacactagtaggacaaagcgggctgaatccttcaggtttctgatacctagctccccaagctgactgggctggcagaggagaacatgttgagacaagggaggcaggggacttatgcatccctcagtgccatcccttgtatcctggaatagctccatttcccctcctcctctctaccagacaaaggagtgcctgtgtcctgtactgccctcgctgtctcccccaccaccctacttgacagcgtgggcatcttcaggcacagccttgggagttcctggtgtgctctgacatcatgacctcaaatctaaatcctccaatcccaactccctttcccaaacaaaaagccacagaggcagagcaagcattcccctttaagagcttccactgcaccccctcccaagggacacagcggtaggaatggtgcttaaactccacaggtatcagagagggtgtaactaggacatcctcaagggcagctaggccccgaatgtacaatgttaagacagggaattttgtgttccattgacttttttttttttttttaatggagtttcactattttgcccaggctggagtgcgatggtgcgatcttggctcactgcaacctctgcctcctgggttcaagtgattctcttgcctcagtctcccgagtagtggaaattacaggtgtgtgctaccacatcttgctagttttgtatttttagcagagatgggggtttcaccatgttggccaggctagtctcgaactcctgacctcaggtgatccacctgccttggcctcccaaagcactgggattacaagcatgagccactgtgcccagcctgttccactgacatttcttagacattcagcaaaacccccaccttaacctcttttctttcttgagggttggtcctgtccccacctccaccctcccaccccctggaagaggaagggcccgggcatcagtggctagtccaaataaaatatgggcttggggatggaatgggtggtggtaagttcacagagtgtagttagatcccaactcccatgacctctggcttcagtggtgggtggggcagggcagatgaaagggcttcagtgggaacctctgagagcattttcctgttccccctatcaaccgcccccagtgataacatctgtgaagccagccattactcaataaactgcaaacttgtctaaaaaaaaaaaaaaaaaaaaaaaaaaaaaaaaaaaaaaaa

SEQ ID NO: 243 - DNA, 3170 bp, Homo sapiens
aggcgctcaggagcgctagggtttgaggcctgctttctgctcgcgccagcagagcactacctgaggcagcgaggcgcagcgagcctagcctccccgcgccctgggcagtgtggccatggagaatcaggtgttgacgccgcatgtctactgggctcagcgacaccgcgagctatatctgcgcgtggagctgagtgacgtacagaaccctgccatcagcatcactgaaaacgtgctgcatttcaaagctcaaggacatggtgccaaaggagacaatgtctatgaatttcacctgaagttcttagaccttgtgaaaccagagcctgtttacaaactgacccagaggcaggtaaacattacagtacagaagaaagtgagtcagtggtgggagagactcacaaagcaggaaaagcgaccactgtttttggctcctgactttgatcgttggctggatgaatctgatgcggaaatggagctcagagctaaggaagaagagcgcctaaataaactccgactggaaagcgaaggctctcctgaaactcttacaaacttaaggaaaggatacctgtttatgtataatcttgtgcaattcttgggattctcctggatctttgtcaacctgactgtgcgattctgtatcttgggaaaagagtccttttatgacacattccatactgtggctgacatgatgtatttctgccagatgctggcagttgtggaaactatcaatgcagcaattggagtcactacgtcaccggtgctgccttctctgatccagcttcttggaagaaattttattttgtttatcatctttggcaccatggaagaaatgcagaacaaagctgtggttttctttgtgttttatttgtggagtgcaattgaaattttcaggtactctttctacatgctgacgtgcattgacatggattggaaggtgctcacatggcttcgttacactctgtggattcccttatatccactgggatgtttggcggaagctgtctcagtgattcagtccattccaatattcaatgagaccggacgattcagtttcacattgccatatccagtgaaaatcaaagttagattttccttttttcttcagatttatcttataatgatatttttaggtttatacataaattttcgtcacctttataaacagcgcagacggcgctatggacaaaaaaagaaaaagatccactaaaaagaaagatttagatggcttcttgccagtttgagcctaatctgattcttacagttttaccttcttgaaccaatgtaaaagtttttttaatgttaaatgattaaattctcagtgaggctatcttccttttccccagtaacattcctgaatttactgttatcttattgtagtacttgcatgacatggattcctgatatctgatgagaggttcattcttgtgtattcagttaatgacaccaaaaggctcagcccaccccaaccctatctcatgttcagtctgtctaatacatgccagagatttttttttcaaaaagtgctttatccctacaatgtactgacagttcttacagttgagatttgttcttttcagctattgcttgtgaaaaaaagcaagactatgtcactctatagaaggctgttaaagtgactcaggcaggaattaattattctgtacctaaggggttacttgtttaatgggatggcattgactttttgaaaatcaagtggactgagtcattgataaaacatttctaagagtggggctagagaacatactttacatctgacatcctttggcctaacaacatctattattatagtgctcagcagtgtgggcattgaagaggcgcagaatgctttgaaagaaactaatcagaatcttggaacatcatgatcatgccattcttaagtaaatcaactattttcaacactgaagaaaaatgaaacattatttagaaaacaatgagattacaagttccaaactcagccaggaatgtggctcacacctgtaatcccagcactttgggacacctaggtgggagcatcgcttgaagccaggagttcaagaccagcttgggcaacgtagtgagacccctatctctacaaaaaataaaaaaattagctgggtgtgatggcacacacctgttgtcccagctactcaagaagctgagatgggaggatcctgagctcaggaggtcaaggctgcagtgagccgagattgtgccactgcactgcagctggggtgacagtgcaagaccctgtctcaaaccaaaccaaaccacacacacacaaacacacatacacacacacacacacgaggtccaaatggtagcagggatccaaagggaacacagtatgtaggtcaaactggcagtaacagtgtacagcctttgacaaactagaaatattagagtaggccaaacacacctccaaactgtaaggctgtgcacaaacataaaaaatggcagccttccatctcctgcactggctgagtccatttacttgtgtacttgttctagtgagtggtgggactgtacatttttgaatagacctcaaaaatacttcattctgctgctgttcagttggctttttaaacctgtctgcagtaggacactgaaaacagcaagaacttcggggtgaacacccgctgatcctttaacaaggatttctggcaggaaactcacaaaaaggagaactgaaaatttagacatacagttggccattgtaaaaaacatcagtttcctctcatacattccaagtaaaccaagtaaaataagtgttggagtaacacttgcataaaagaatttaaggagtgatagctctttctgttctgccattcccaacattcctgggggaaaggagactcaatgagttaatactatttcactgagcccaagatggaaacttggtttgacctaaaacatctgattaatataggctagctgatttcttaaaaattcgttgcattgaaggatattttgcatgtctgtaacacctgtcaatacttgtttgtattgatttctgatattcttgcagctgactacgtgtaattgggcagatcagctttgcagtagattatgctgcatcctcgtggcaaaattctgtattcttagtgattgttacaaacccctttattgctgtctgagaaagtgaaagattgtgtatttctattaaaacatttacaatc

SEQ ID NO: 244 - DNA, 1536 bp, Homo sapiens
ggggggggggggaccacttggcctgcctccgtcccgccgcgccacttggcctgcctccgtcccgccgcgccacttcgcctgcctccgtcccccgcccgccgcgccatgcctgtggccggctcggagctgccgcgccggcccttgccccccgccgcacaggagcgggacgccgagccgcgtccgccgcacggggagctgcagtacctggggcagatccaacacatcctccgctgcggcgtcaggaaggacgaccgcacgggcaccggcaccctgtcggtattcggcatgcaggcgcgctacagcctgagagatgaattccctctgctgacaaccaaacgtgtgttctggaagggtgttttggaggagttgctgtggtttatcaagggatccacaaatgctaaagagctgtcttccaagggagtgaaaatctgggatgccaatggatcccgagactttttggacagcctgggattctccaccagagaagaaggggacttgggcccagtttatggcttccagtggaggcattttggggcagaatacagagatatggaatcagattattcaggacagggagttgaccaactgcaaagagtgattgacaccatcaaaaccaaccctgacgacagaagaatcatcatgtgcgcttggaatccaagagatcttcctctgatggcgctgcctccatgccatgccctctgccagttctatgtggtgaacagtgagctgtcctgccagctgtaccagagatcgggagacatgggcctcggtgtgcctttcaacatcgccagctacgccctgctcacgtacatgattgcgcacatcacgggcctgaagccaggtgactttatacacactttgggagatgcacatatttacctgaatcacatcgagccactgaaaattcagcttcagcgagaacccagacctttcccaaagctcaggattcttcgaaaagttgagaaaattgatgacttcaaagctgaagactttcagattgaagggtacaatccgcatccaactattaaaatggaaatggctgtttagggtgctttcaaaggagcttgaaggatattgtcagtctttaggggttgggctggatgccgaggtaaaagttctttttgctctaaaagaaaaaggaactaggtcaaaaatctgtccgtgacctatcagttattaatttttaaggatgttgccactggcaaatgtaactgtgccagttctttccataataaaaggctttgagttaactcactgagggtatctgacaatgctgaggttatgaacaaagtgaggagaatgaaatgtatgtgctcttagcaaaaacatgtatgtgcatttcaatcccacgtacttataaagaaggttggtgaatttcacaagctatttttggaatatttttagaatattttaagaatttcacaagctattccctcaaatctgagggagctgagtaacaccatcgatcatgatgtagagtgtggttatgaactttatagttgttttatatgttgctataataaagaagtgttctgc

SEQ ID NO: 245 - DNA, 1550 bp, Homo sapiens
tcaacgcctgcctcccctcgagcgtcctcagcgcagccgccgcccgcggagccagcacgaacgagcccagcaccggccggatggagcgtccgcaacccgacagcatgccccaggatttgtcagaggccctgaaggaggccaccaaggaggtgcacacccaggcagagaatgctgagttcatgaggaactttcagaagggccaggtgacccgagacggcttcaagctggtgatggcctccctgtaccacatctatgtggccctggaggaggagattgagcgcaacaaggagagcccagtcttcgcccctgtctacttcccagaagagctgcaccgcaaggctgccctggagcaggacctggccttctggtacgggccccgctggcaggaggtcatcccctacacaccagccatgcagcgctatgtgaagcggctccacgaggtggggcgcacagagcccgagctgctggtggcccacgcctacacccgctacctgggtgacctgtctgggggccaggtgctcaaaaagattgcccagaaagccctggacctgcccagctctggcgagggcctggccttcttcaccttccccaacattgccagtgccaccaagttcaagcagctctaccgctcccgcatgaactccctggagatgactcccgcagtcaggcagagggtgatagaagaggccaagactgcgttcctgctcaacatccagctctttgaggagttgcaggagctgctgacccatgacaccaaggaccagagcccctcacgggcaccagggcttcgccagcgggccagcaacaaagtgcaagattctgcccccgtggagactcccagagggaagcccccactcaacacccgctcccaggctccgcttctccgatgggtccttacactcagctttctggtggcgacagttgctgtagggctttatgccatgtgaatgcaggcatgctggctcccagggccatgaactttgtccggtggaaggccttctttctagagagggaattctcttggctggcttccttaccgtgggcactgaaggctttcagggcctccagccctctcactgtgtccctctctctggaaaggaggaaggagcctatggcatcttccccaacgaaaagcacatccaggcaatggcctaaacttcagagggggcgaaggggtcagccctgcccttcagcatcctcagttcctgcagcagagcctggaagacaccctaatgtggcagctgtctcaaacctccaaaagccctgagtttcaagtatccttgttgacacggccatgaccactttccccgtgggccatggcaatttttacacaaacctgaaaagatgttgtgtcttgtgtttttgtcttatttttgttggagccactctgttcctggctcagcctcaaatgcagtatttttgttgtgttctgttgtttttatagcagggttggggtggtttttgagccatgcgtgggtggggagggaggtgtttaacggcactgtggccttggtctaacttttgtgtgaaataataaacaacattgtctg

SEQ ID NO: 246 - DNA, 841 bp, Homo sapiens
  misc_feature (47)..(47): N may be C, G, T or A
  misc_feature (49)..(49): N may be C, G, T or A
gaaggtcagcgtgtgaagtaggcgctggcaacgcggggttaccctgntntattgaggagtaacggcccagcggaccacccaggcttgaggcagcggcgggaaccactcggtttgctgcgataccatggaaggaggcgggggaagcggcaacaaaaccacagggggattggccggctttttcggagccggcggagcaggttactcgcacgcggatttggctggcgtcccgctaactggtatgaaccctctgtctccttatttaaatgtggatccacgatacctcgtgcaggatacagatgagtttattttacctaccggagctaataaaacccggggcagatttgagctggccttctttacgattggaggatgttgcatgacaggggctgcgtttggtgcaatgaatggtcttcggctaggattgaaggaaacccagaacatggcctggtccaaaccaagaaatgtacagattttgaatatggtgactaggcaaggggcactttgggctaatactctaggttctctggctttgctctatagtgcatttggtgtcatcattgagaaaacacgaggtgcagaagatgaccttaacacagtagcagctggaaccatgacaggcatgttgtataaatgtacaggtggtcttcgagggatagcacgaggtggtctgacaggactaacacttaccagcctctatgcactatataataactgggagcacatgaaaggctccttgctccaacagtcactctgaagattttgccaactcatgaatggaggacacttcagtagttcatctaggatccttttattaaggacagtttgggagttatttctctct

SEQ ID NO: 247 - DNA, 3803 bp, Homo sapiens
ccgcgagtccaccgagcggcctctgaggagcagccgcaggaggaggaggaggtcgtcgggggcggcgggcggagaccggctcttctcgcttccccggcggcggcaagggcaggacaatggaggtggcggtggagaaggcggtggcggcggcggcagcggcctcggctgcggcctccggggggccctcggcggcgccgagcggggagaacgaggccgagagtcggcagggcccggactcggagcgcggcggcgaggcggcccggctcaacctgttggacacttgcgccgtgtgccaccagaacatccagagccgggcgcccaagctgctgccctgcctgcactctttctgccagcgctgcctgcccgcgccccagcgctacctcatgctgcccgcgcccatgctgggctcggccgagaccccgccacccgtccctgccccggctcgccggtcagcctcgtcgccgttcgccacccaagttggagtcattcgttgcccagtttgcagccaagaatgtgcagagagacacatcatagataacttttttgtgaaggacactactgaggttcccagcagtacagtagaaaagtcaaatcaggtatgtacaagctgtgaggacaacgcagaagccaatgggttttgtgtagagtgtgttgaatggctctgcaagacgtgtatcagagctcatcagagggtaaagttcacaaaagaccacactgtcagacagaaagaggaagtatctccagaggcagttggtgtcaccagccagcgaccagtgttttgtccttttcataaaaaggagcagctgaagctgtactgtgagacatgtgacaaactgacatgtcgagactgtcagttgttagaacataaagagcatagataccaatttatagaagaagcttttcagaatcagaaagtgatcatagatacactaatcaccaaactgatggaaaaaacaaaatacataaaattcacaggaaatcagatccaaaacagaattattgaagtaaatcaaaatcaaaagcaggtggaacaggatattaaagttgctatatttacactgatggtagaaataaataaaaaaggaaaagctctactgcatcagttagagagccttgcaaaggaccatcgcatgaaacttatgcaacaacaacaggaagtggctggactctctaaacaattggagcatgtcatgcatttttctaaatgggcagtttccagtggcagcagtacagcattactttatagcaaacgactgattacataccggttacggcacctccttcgtgcaaggtgtgatgcatccccagtgaccaacaacaccatccaatttcactgtgatcctagtttctgggctcaaaatatcatcaacttaggttctttagtaatcgaggataaagagagccagccacaaatgcctaagcagaatcctgtcgtggaacagaattcacagccaccaagtggtttatcatcaaaccagttatccaagttcccaacacagatcagcctagctcaattacggctccagcatatgcagcaacagcaaccgcctccacgtttgataaactttcagaatcacagccccaaacccaatggaccagttcttcctcctcatcctcaacaactgagatatccaccaaaccagaacataccacgacaagcaataaagccaaaccccctacagatggctttcttggctcaacaagccataaaacagtggcagatcagcagtggacagggaaccccatcaactaccaacagcacatcctctactccttccagccccacgattactagtgcagcaggatatgatggaaaggcttttggttcacctatgatcgatttgagctcaccagtgggagggtcttataatcttccctctcttccggatattgactgttcaagtactattatgctggacaatattgtgaggaaagatactaatatagatcatggccagccaagaccaccctcaaacagaacggtccagtcaccaaattcatcagtgccatctccaggccttgcaggacctgttactatgactagtgtacaccccccaatacgttcacctagtgcctccagcgttggaagccgaggaagctctggctcttccagcaaaccagcaggagctgactctacacacaaagtcccagtggtcatgctggagccaattcgaataaaacaagaaaacagtggaccaccggaaaattatgatttccctgttgttatagtgaagcaagaatcagatgaagaatctaggcctcaaaatgccaattatccaagaagcatactcacctccctgctcttaaatagcagtcagagctctacttctgaggagactgtgctaagatcagatgcccctgatagtacaggagatcaacctggacttcaccaggacaattcctcaaatggaaagtctgaatggttggatccttcccagaagtcacctcttcatgttggagagacaaggaaagaggatgaccccaatgaggactggtgtgcagtttgtcaaaacggaggggaactcctctgctgtgaaaagtgccccaaagtattccatctttcttgtcatgtgcccacattgacaaattttccaagtggagagtggatttgcactttctgccgagacttatctaaaccagaagttgaatatgattgtgatgctcccagtcacaactcagaaaaaaagaaaactgaaggccttgttaagttaacacctatagataaaaggaagtgtgagcgcctacttttatttctttactgccatgaaatgagcctggcttttcaagaccctgttcctctaactgtgcctgattattacaaaataattaaaaatccaatggatttgtcaaccatcaagaaaagactacaagaagattattccatgtactcaaaacctgaagattttgtagctgattttagattgatctttcaaaactgtgctgaattcaatgagcctgattcagaagtagccaatgctggtataaaacttgaaaattattttgaagaacttctaaagaacctctatccagaaaaaaggtttcccaaaccagaattcaggaatgaatcagaagataataaatttagtgatgattcagatgatgactttgtacagccccggaagaaacgcctcaaaagcattgaagaacgccagttgcttaaataatatgcagcaccactagcttgtgctggtttttagatttttttgttttcaaaaaaacatttgtcagtaatttaacatcactacaaaaagaaggagtttgtgactattctcatctctgttttgcaggtttacgccgcacactttgatttccttaatagcccatttctgttaacctattatcactaagaaagaaaggaaagaaggagatgaatagaagaaagaaaatggaaagaaggaaaaaaggaggattgaaaaaggatggaagaaagaagccattgaaaacaaagacattcttcccacttcttggatttttaaaccacagtctggagtgatagctactgtagaaaggaaatagacttttatgaactctttaagttgaaaagtaaaaaatatatgtggtttggatgtgtgctttaattcagctttagaaattaataccactacccgtgaattatatggcctgacaatatgaattaggtgtactgtactgaagaacagtactccacaaacatgggtggtaacaagagttccatcccaggaggccaaacggtgcaacagaagggtaggttagatgctattaagaaggcacttaatagtacatcatgtaagatggcaactgtattaaagaaaaatccggaaaac

SEQ ID NO: 248 - DNA, 1782 bp, Homo sapiens
cggtggcgccgcgcagtcaccgcggagcagacgcggaggctggtggccctgggcgagatgccgtacgccaaccagcctaccgtgcggatcacggagctcactgacgagaatgtcaagttcatcatcgagaacaccgacctggcggtggccaattcgattcggagggtcttcatcgctgaggttcccataatagccattgactgggttcagattgatgccaattcctcagtccttcatgatgaattcattgctcacaggcttggattaattcccctcattagtgatgacattgtggacaagctgcagtactctcgggactgcacatgtgaggagttctgccccgagtgctcggtggagttcaccctcgatgtgcggtgcaatgaagaccagacgcgacatgtcacgtctcgagacctcatctccaacagcccccgggtcattccggtgacatcccggaaccgagataatgaccccaatgactacgtggagcaggatgacatcctcatcgtcaagttgagaaagggccaggagctgagacttcgagcctatgccaaaaagggctttggcaaggagcatgccaagtggaaccctactgcaggggtggcttttgaatacgatccagacaatgccctgaggcacacagtgtaccccaagcccgaggaatggccaaagagtgagtactcggagctggatgaggatgagtcgcaggctccctatgaccccaacggcaagccagaaaggttttactacaatgtggagtcctgtggctctctgcgtcctgaaaccattgtcctgtcagccctctcaggattgaagaagaaactgagtgatttacaaactcaattaagccacgagatccagagtgatgtgctaaccataaattaactgcagcttgcctgcttcagcaaaaacggagattcaggccagcagctggatatgggggtctctcttcagactcttctcgtttctgagaatctagtctactgttggttgagcttcttggcaggacatcagtaccaactagaagtgggtcatagatagattaccagggatgcagtggtgtttaggcaggataggtctttactggccctgactgctgttaataattggcagcagtgctccccagatcccagaaggtccctgctggagtgtttccagtgcacctgtaggaacaactagacttctctcctggttagtccagctctttactctaaaccctttctgtccaaaatgagtcattttcagttgtaccttagatgtctggtgttgaggatcaagtgccatagcctttattcagggggcctataaacccttccagttcttgccccagggctggcctgctagcgcttcaaattcccaggtgtccctaatttgagaagtaaccttttggaatagcattagaccctggctgtcccctccccaccaaataaacatgatatttcattctctgtccagcagtcatgaaccccttcacctccaatgacctgatcatttagtttggtgggggtgggggtgggggtgggggtgggggtggaagcagccgcaggagcaagggcccctcccacatacacaggaggagtatttcatttctccttaatgaaggctctggccctaacccctcagcactgtctccagataggaacatgcacaaagcagttaattaggcagcctggagaaaaccagagatccagtacagaaaggaaaggatatttattgattaacagaagttgtctttttaaaagtgtttatttttgcaataaagagcacaacataaaaaaaaaa

SEQ ID NO: 249 - DNA, 2591 bp, Homo sapiens
gtcgtggaagcaggactgcgccgcgtcttcctcaaggtggggttcggggggccaccgaatcgctgtcacgccggcaggttgagaacaaaaacatgcacctggagtttccccggagccctctgcgtggttgagcttcggtggaatttcggggctcttggctgccagccgcgcttgcctggtagcaacagaaaccagtcctgctctcctccgtggacatttcattaccatccagaagtgtctcccactgaaggcatccgtggttgtttttaagccacaaaaaagccacacccaagatcacctgacacccaccctgacaagtgtccatgatgctgggccctgagggaggtgaaggctttgtggtcaagctccgtggcctgccctggtcctgctctgttgaggacgtgcagaacttcctctctgactgcacgattcatgatggggccgcaggtgtccatttcatctacactagagagggcaggcagagtggtgaggcttttgttgaacttggatcagaagatgatgtaaaaatggccctgaaaaaagacagggaaagcatgggacaccggtacattgaggtgttcaagtcccacagaaccgagatggattgggtgttgaagcacagtggtcccaacagtgccgacagcgccaacgatggcttcgtgcggcttcgaggactcccatttggatgcacaaaggaagaaattgttcagttcttctcagggttggaaattgtgccaaacgggatcacattgcctgtggaccccgaaggcaagattacaggggaagcgttcgtgcagtttgcctcgcaggagttagctgagaaggctctagggaaacacaaggagaggatagggcacaggtacattgaggtgtttaagagcagccaggaggaagttaggtcatactcagatccccctctgaagttcatgtccgtgcagcggccagggccctatgaccggcccgggactgccaggaggtacattggcatcgtgaagcaggcaggcctggaaaggatgaggcctggtgcctacagcacaggctacgggggctacgaggagtacagtggcctcagtgatggctacggcttcaccaccgacctgttcgggagagacctcagctactgtctctccgggatgtatgaccacagatacggcgacagtgagttcacagtgcagagcaccacaggccactgtgtccacatgaggggcctgccgtacaaagcgaccgagaacgacatttacaacttcttctctcctctcaaccctgtgagagtccatattgagattggcccagatggaagagtgacgggtgaagcagatgttgagtttgctactcatgaagaagctgtggcagctatgtccaaagacagggccaatatgcagcacagatatatagaactcttcttgaattcaacaacaggggccagcaatggggcgtatagcagccaggtgatgcaaggcatgggggtgtctgctgcccaggccacttacagtggcctggagagccagtcagtgagtggctgttacggggccggctacagtgggcagaacagcatgggtggctatgactagttttgttaggaacatttgagttacttcaatcattttcacaggcagccaacaagcaattaagagcagttataatagaggaagctgggggacccattttgcaccatgagtttgtgaaaaatctggattaaaaaattacctcttcagtgttttctcatgcaaaattttcttctagcatgtgataatgagtaaactaaaactattttcagcttttctcaattaacattttggtagtatacttcagagtgatgttatctaagtttaagtagtttaagtatgttaaatgtggatcttttacaccacatcacagtgaacacactggggagacgtgcttttttggaaaactcaaaggtgctagctccctgattcaaagaaatatttctcatgtttgttcattctagtttatattttcatttaaaatcctttaggttaagtttaagctttttaaaagttagttttgagaattgagacacaatactaatactgtaggaattggtgaggccttgacttaaaactttctttgtactgtgatttccttttgggtgtattttgctaagtgaaacttgttaaattttttgttaactaaatttttttcttaaaataaagactttttcacaatgactggcacagattactcagcaaaagatagcaaaacgggtggttgaagataattcattttaatcgtaatgtattttagtgtgaatttaaaaatttcatacatcaaatctatgatctcccttatattcttatgatgaggctaaataaaagtctaataaaaatgttaaatatgtgaatggtggaaatggtgactagcagcacacattctgggaagcatcaaatagacacacggccccagccacctgcaacttatgtgcactgttgtaaaccattcagaattttcctgctaggcccttgatgctggagtcacatctgttgatagctggagaactttagtttcaagtactacattgtgaaagcaattattttgtttctcgtttttataaaatgctgacttaaactttt

SEQ ID NO: 250 - DNA, 1535 bp, Homo sapiens
cctccgctcagtccgggagcgcacgtgggccgcggcgctccgacctccgctttcccaccgcccgcagctgaagcacatcccgcagcccggcgcggactccgatcgccgcagttgccctctggcgccatgtcgcagaacggagcgcccgggatgcaggaggagagcctgcagggctcctgggtagaactgcacttcagcaataatgggaacgggggcagcgttccagcctcggtttctatttataatggagacatggaaaaaatactgctggacgcacagcatgagtctggacggagtagctccaagagctctcactgtgacagcccacctcgctcgcagacaccacaagataccaacagggcttctgaaacagatacccatagcattggagagaaaaacagctcacagtctgaggaagatgatattgaaagaaggaaagaagttgaaagcatcttgaagaaaaactcagattggatatgggattggtcaagtcggccggaaaatattccccccaaggagttcctctttaaacacccgaagcgcacggccaccctcagcatgaggaacacgagcgtcatgaagaaagggggcatattctctgcagaatttctgaaagttttccttccatctctgctgctctctcatttgctggccatcggattggggatctatattggaaggcgtctgacaacctccaccagcaccttttgatgaagaactggagtctgacttggttcgttagtggattacttctgagcttgcaacatagctcactgaagagctgttagatcctggggtggccacgtcacttgtgtttatttgttctgtaaatgctgcgttcctaatttagtaaaataaaagaatagacactaaaatcatgttgatctataattacacctatgggatcaataagcatgtcagactgattaatgtctactgtgaaaatttggtagtaaattttcatttgatattagatataaatatctgaatataaataattttaatatactagtcatgatgtgtgttgtattttaaaaattatctgcaaccttaattcagctgaagtactttatatttcaaaagaatgaataacattgataataaaatcgctactttaaggggtttgtccaaaataaatattgtggccttatatatcacactattgtagaaagtattatttaatttaaatggatgcaggttgtctactaaagaaagattatatataactatgctaattgttcataatcaacagaaaccaagatagagctacaaactcagctgtacagttcgtacactaaactcttcttgcttttgcattataaggaattaagtctccgattattaggtgatcaccctggatgatcagttttctgctgaaggcacctactcagtatcttttcctctttatcactctgcattggtgaatttaatcctctcctttgtgttcaacttttgtgtgcttttaaaatcagctttattctaagcaaatctgtgtctactttaaaaaactggaaatggaaaaaaaaataaatctt

SEQ ID NO: 251 - DNA, 921 bp, Homo sapiens
gcggcgctcgcgccaagggacgtgtttctgcgctcgcgtggtcatggaggcgctgccgctgctagccgcgacaactccggaccacggccgccaccgaaggctgcttctgctgccgctactgctgttcctgctgccggctggagctgtgcagggctgggagacagaggagaggccccggactcgcgaagaggagtgccacttctacgcgggtggacaagtgtacccgggagaggcatcccgggtatcggtcgccgaccactccctgcacctaagcaaagcgaagatttccaagccagcgccctactgggaaggaacagctgtgatcgatggagaatttaaggagctgaagttaactgattatcgtgggaaatacttggttttcttcttctacccacttgatttcacatttgtgtgtccaactgaaattatcgcttttggcgacagacttgaagaattcagatctataaatactgaagtggtagcatgctctgttgattcacagtttacccatttggcctggattaatacccctcgaagacaaggaggacttgggccaataaggattccacttctttcagatttgacccatcagatctcaaaggactatggtgtatacctagaggactcaggccacactcttagaggtctcttcattattgatgacaaaggaatcctaagacaaattactctgaatgatcttcctgtgggtagatcagtggatgagacactacgtttggttcaagcattccagtacactgacaaacacggagaagtctgccctgctggctggaaacctggtagtgaaacaataatcccagatccagctggaaagctgaagtatttcgataaactgaattgagaaatacttcttcaagttatgatgcttgaaagttctcaataaagttcacggtttcattacca

SEQ ID NO: 252 - DNA, 1775 bp, Homo sapiens
agcggccggggcgagccagcgagagggcgcgagcggcggcgctgcctgcagcctgcagcctgcagcctccggccggccggcgagccagtgcgcgtgcgcggcggcggcctccgcagcgaccggggagcggactgaccggcgggagggctagcgagccagcggtgtgaggcgcgaggcgaggccgagccgcgagcgacatgggggaccgggagcagctgctgcagcgggcgcggctggccgagcaggcggagcgctacgacgacatggcctccgctatgaaggcggtgacagagctgaatgaacctctctccaatgaagatcgaaatctcctctctgtggcctacaagaatgtggttggtgccaggcgatcttcctggagggtcattagcagcattgagcagaaaaccatggctgatggaaacgaaaagaaattggagaaagttaaagcttaccgggagaagattgagaaggagctggagacagtttgcaatgatgtcctgtctctgcttgacaagttcctgatcaagaactgcaatgatttccagtatgagagcaaggtgttttacctgaaaatgaagggtgattactaccgctacttagcagaggtcgcttctggggagaagaaaaacagtgtggtcgaagcttctgaagctgcctacaaggaagcctttgaaatcagcaaagagcagatgcaacccacgcatcccatccggctgggcctggccctcaacttctccgtgttctactatgagatccagaatgcacctgagcaagcctgcctcttagccaaacaagccttcgatgatgccatagctgagctggacacactaaacgaggattcctataaggactccacgctgatcatgcagttgctgcgagacaacctcaccctctggacgagcgaccagcaggatgaagaagcaggagaaggcaactgaagatccttcaggtcccctggcccttccttcacccaccacccccatcatcaccgattcttccttgccacaatcactaaatatctagtgctaaacctatctgtattggcagcacagctactcagatctgcactcctgtctcttgggaagcagtttcagataaatcatgggcattgctggactgatggttgctttgagcccacaggagctccctttttgaattgtgtggagaagtgtgttctgatgaggcattttactatgcctgttgatctatgggaaatctaggcgaaagtaatggggaagattagaaagaattagccaaccaggctacagttgatatttaaaagatccatttaaaacaagctgatagtgtttcgttaagcagtacatcttgtgcatgcaaaaatgaattcacccctcccacctctttcttcaattaatggaaaactgttaagggaagctgatacagagagacaacttgctcctttccatcagctttataataaactgtttaacgtgaggtttcagtagctccttggttttgcctctttaaattatgacgtgcacaaaccttcttttcaatgcaatgcatctgaaagttttgatacttgtaacttttttttttttttggttgcaattgtttaagaatcatggatttattttttgtaactctttggctattgtccttgtgtatcctgacagcgccatgtgtgtcagcccatgtcaatcaagatgggtgattatgaaatgccagacttctaaaataaatgttttggaattcaatgggtaaataaatgctgctttggggatattaaaaaaaaaaaaaaaaaaaaaaaaaaa

SEQ ID NO: 253 - DNA, 1793 bp, Homo sapiens
ggcaccgcgcgggacggagcttggctgttggtcggtgggttcccgtgcggcggcggccaaggaggaggagacacagttggagcagctccgtgggctgactggggcgaggcctcagcagcgcgagcttgagtgcggccgagcctgcggcgccttcccctgcgggtggggacgagcgggccccgcggcgtcatcggcggcgaggagccgccgcgcctcggcctagcatgtcggaagcgggcgaggagcagcccatggagacgacgggcgccaccgagaacggacatgaggccgtccccgaagcgagtcgcggccggggctggacgggcgccgcggcggggctggaggcgcgaccgccgcgcccccgagcgggaatcagaacggcgccgagggaccagatcaacgccagcaagaacgaggaggacgcgggaaaaatgttcgttggtggcctgagctgggatactagcaaaaaagatttaaaagactattttactaaatttggagaggtcgttgactgtacaataaaaatggatcccaacactggacggtcaagagggtttgggtttatcctgttcaaagatgcagccagtgtggagaaggtcctagaccagaaggagcacaggctggatggccgtgtcattgaccctaaaaaggccatggctatgaagaaggacccggtcaagaaaatcttcgttgggggtctgaatcctgaaagtcccactgaggaaaagatcagggagtactttggcgagtttggggagattgaggccattgaattgccaatggatccaaagttgaacaaaagacgaggttttgtgtttatcacctttaaagaagaagaacccgtgaagaaggttctggagaaaaagttccatactgtcagtggaagcaagtgtgagatcaaggtggcccagcccaaagaagtctatcagcagcagcagtatggctctgggggccgtggaaaccgcaaccgagggaaccgaggcagcggaggtggtggtggaggtggaggtcagagtcagagttggaatcagggctacggcaactactggaaccagggctacggctaccagcagggctacgggcctggctatggcggctacgactactcgccctatggctattacggctacggccccggctacgactacagtcagggtagtacaaactacggcaagagccagcgacgtggtggccatcagaataactacaagccatactgaggcggccaagggagcgaccaactgatcgcacacatgctttgtttggatatggagtgaacacaattatgtaccaaatttaacttggcaaactttctattgcctgtcccatgtgcatcttatttaaaatttcccccatggaaatcactctcctgttgactatttccagagctctaggtgtttaggcagcgtgtggtgtctgagaggccatagcgccatcatgggctgatttttattaccaggtcccccagaagcaggtgagaggctctgcttcctgctgccgctctgcagcctggacctgtggaccctggttgtaaagagtaaattgtatcttaggaaaccagtgtcacctttttttcaccttttaattttatattatttgcgtcatacatttcctgtaacggaagtgttaattttactgtactttttggtaccccttttgggaatctaatgtattgtaaggtattttacacgtgtcctgattttgccacaacctggatattgaagctatccaagcttttgaaataaaatttaaaaaccccaagcctgggtgagtgtgggaaaaaaaaaaaaaaa

SEQ ID NO: 254 - DNA, 556 bp, Homo sapiens
ggccacgaggggaaattgacgaacacgtgacgcggtcgggcggaccactgcagactgagcggtggaccgaattgggaccgctggcttataagcgatcatgtttctccagtattacctcaacgagcagggagatcgagtctatacgctgaagaaatttgacccgatgggacaacagacctgctcagcccatcctgctcggttctccccagatgacaaatactctcgacaccgaatcaccatcaagaaacgcttcaaggtgctcatgacccagcaaccgcgccctgtcctctgagggtcccttaaactgatgtcttttctgccacctgttacccctcggagactccgtaaccaaactcttcggactgtgagccctgatgcctttttgccagccatactctttggcatccagtctctcgtggcgattgattatgcttgtgtgaggcaatcatggtggcatcacccataaagggaacacatttgacttttttttctcatattttaaattactacaagattattaaagataaaatgattttgaaaaacaaaaaaaaaaaaa

SEQ ID NO: 255 - DNA, 1976 bp, Homo sapiens
gccacacggtctttgagctgagtcgaggtggaccctttgaacgcagtcgccctacagccgctgattccccccgcatcgcctcccgtggaagcccaggcccgcttcgcagctttctccctttgtctcataaccatgtccaccaacgagaatgctaatacaccagctgcccgtcttcacagattcaagaacaagggaaaagacagtacagaaatgaggcgtcgcagaatagaggtcaatgtggagctgaggaaagctaagaaggatgaccagatgctgaagaggagaaatgtaagctcatttcctgatgatgctacttctccgctgcaggaaaaccgcaacaaccagggcactgtaaattggtctgttgatgacattgtcaaaggcataaatagcagcaatgtggaaaatcagctccaagctactcaagctgccaggaaactactttccagagaaaaacagccccccatagacaacataatccgggctggtttgattccgaaatttgtgtccttcttgggcagaactgattgtagtcccattcagtttgaatctgcttgggcactcactaacattgcttctgggacatcagaacaaaccaaggctgtggtagatggaggtgccatcccagcattcatttctctgttggcatctccccatgctcacatcagtgaacaagctgtctgggctctaggaaacattgcaggtgatggctcagtgttccgagacttggttattaagtacggtgcagttgacccactgttggctctccttgcagttcctgatatgtcatctttagcatgtggctacttacgtaatcttacctggacactttctaatctttgccgcaacaagaatcctgcacccccgatagatgctgttgagcagattcttcctaccttagttcggctcctgcatcatgatgatccagaagtgttagcagatacctgctgggctatttcctaccttactgatggtccaaatgaacgaattggcatggtggtgaaaacaggagttgtgccccaacttgtgaagcttctaggagcttctgaattgccaattgtgactcctgccctaagagccatagggaatattgtcactggtacagatgaacagactcaggttgtgattgatgcaggagcactcgccgtctttcccagcctgctcaccaaccccaaaactaacattcagaaggaagctacgtggacaatgtcaaacatcacagccggccgccaggaccagatacagcaagttgtgaatcatggattagtcccattccttgtcagtgttctctctaaggcagattttaagacacaaaaggaagctgtgtgggccgtgaccaactataccagtggtggaacagttgaacagattgtgtaccttgttcactgtggcataatagaaccgttgatgaacctcttaactgcaaaagataccaagattattctggttatcctggatgccatttcaaatatctttcaggctgctgagaaactaggtgaaactgagaaacttagtataatgattgaagaatgtggaggcttagacaaaattgaagctctacaaaaccatgaaaatgagtctgtgtataaggcttcgttaagcttaattgagaagtatttctctgtagaggaagaggaagatcaaaacgttgtaccagaaactacctctgaaggctacactttccaagttcaggatggggctcctgggacctttaacttttagatcatgtagctgagacataaatttgttgtgtactacgtttggtattttgtcttattgtttctctactaagaactctttcttaaatgtggtttgttactgtagcactttttacactgaaactatacttgaacagttccaactgtacatacatactgtatgaagcttgtcctctgactaggtttctaatttctatgtggaatttcctatcttgcagcatcctgtaaataaacattcaagtccacccttaaaaaaaa

SEQ ID NO: 256 - DNA, 3668 bp, Homo sapiens
caaatgacaatttcagctctaaatcttctgtaggaatttgtcttgtgcttttgtaaatgtcagtgttactcttagagattgtctcagaagcttcatatggagtcttgtggggtttttttttccttgacttttcccaaccctattactcttcttcagtgtcttcattttgggagaaggtttttccaaagttaccgtaatgaggaagtccatctcaacaacaacactgttatgaccctatcttcagcaatgggaaatagaaaattagagggaaagtccacaaggacaaaacaaaagagggtgaacagacagtagatctttcagtactctgttttgggtcccatgtgatgaatggcattagacatacttgaggccaatctgccactgtcgccatttctggactagttaattgcctcacaagttcttttcctaggaatttataacagttctcaaaaccgtaaagttgttcgtaatatttcactgtatttatatgtaaccctgtagagttgatctctgcatcataagtactctcccagagtttaagaaatggtggcttaacataagtcatgaaagtcacgttgtaaaaatttgtattccttaatattgttactatacctaaaatgtatattaatctttttctccccctttttcatgaaaagaaccaccaatctttccagcaagctgatggagtttaatttaggtactgataaacagactttcttgtctaagcttatcaaatccattttcatttcctatttggagaactatattgaggtggagactggatatttgaaaagcagaagtgctatgatcctacagcgctattatgattcgaaaaaccatcaaaagagatccattggcacaggaggtattcaagatttgaaggaaagaattagacagcgtaccaacttaccacttgggccaagtatcgatactcatggggagacttttctatcccaagaagtggtggttaatcttttacaagaaaccaaacaagcctttgaaagatgtcataggctctctgatccttctgacttaccaaggaatgccttcagaatttttaccattcttgtggaatttttatgtattgagcatattgattatgctttggaaacaggacttgctggaattccctcttcagattctaggaatgcaaatctttattttttggacgttgtgcaacaggccaatactatttttcatctttttgacaaacagtttaatgatcaccttatgccactaataagctcttctcctaagttatctgaatgccttcagaagaaaaaagaaataattgaacaaatggagatgaaattggatactggcattgataggacattaaattgtatgattggacagatgaagcatattttggctgcagaacagaagaaaacagattttaagccagaagatgaaaacaatgttttgattcaatatactaatgcctgtgtaaaagtctgtgcttacgtaagaaaacaagtggagaagattaaaaattccatggatgggaagaatgtggatacagttttgatggaacttggagtacgttttcatcgacttatctatgagcatcttcaacaatattcctacagttgtatgggtggcatgttggccatttgtgatgtagccgaatataggaagtgtgccaaagacttcaagattccaatggtattacatctttttgatactctgcatgctctttgcaatcttctggtagttgccccagataatttaaagcaagtctgctcaggagaacaacttgctaatctggacaagaatatacttcactccttcgtacaacttcgtgctgattatagatctgcccgccttgctcgacacttcagctgagattgaatttacaaaggaattcagtgtcagttcctttacagaggaatgtcttatacttcagcagccctcggttgatagaaagcacaggagataccttatgacacagccaacattttgtgaaacaatgactggaacaaaacagcagccatacttacctttgaggttttatttaaagtttggataccactagctatattttgcttttttcccctcacattgaattttaattccattcttgaatgtagaaatttcagattctctaaaactacatgtcactgtttttatcctagaaaatgttgctgtcagaaggcaaaggaaatgttaccagtgttttcggttcttgtacttttaacatattccatttagaaattttgccattctgttttccattaataataggtgaaatacaggaaaactacatttgttattcctcagtttttaatgaccttttcagcatcaattgttaatcagattattttaggttttcgtaaataatttttttgcctctttcaaaaggttaacaattaagcatactttctgcagttggttgattggatttttttctgaggtacagcattaatactagtccaaaaaatgtcataaactgaactaaaatgatgaactattttatgtagacattaggagtggatcggaatacttctgctttctgggtaaaacttaaaagtttactatttcttatttggtaaatagattttaagccaattctagtaagaaattaataaaactaccttattttgtatttcacttaaggtggaggaccttaactaaaggaccatatttattcattattttaatattataagggaagtaaaaaaaagtgaggtatagtctaaatggtgcatataggaaatactgacagtgtttagcaacatgcagccctttgagatttctgtcgtaatgctaaacttgaataagatggaatggctgaacatgtggttagtcttttattttaagaagaattgagaattgatagatttggagatgagctttgcaaaggctgtttgcttttcatgtctataggtctgtcattgtcctttttcaaagcatttctgaagttattcctacttggatatagttaatggaattggcttaatttgatgacataataaatcacttataaaattttaaatatcaagtgaaaatttagaaaggccattactattctataaaccttataaacttgctctgggagaatgcattctaaattatatatagtgtttcagctcccattgtggtgttcatagtcttctaggaacagataaacttaagtattcaattcactcttggcatttttctttaatataggctttttagcctatttttggaaaactgcttttcttctgagaaccttattctgaatgtcatcaactttaccaaaccttctaagtccagagctaacttagtactgtttaagttactattgactgaattttcttcattttctgtttagtccagtgttaccaaggtaagctggggaatgaagtataccaacttctttcagagcattttaggacattatggcagctttagaaggctgtcttgtttctagccaagggagagccagcgcaggttttggatactagagaaagtcatttgcttgtactattgccattttagaaagctctgatgtgaattcaaattttacctctgttacttaaagccaacaattttaaggcagtagttttactggccatttaagctctttgtacagtgtcaatttgtaaaaaagaaaaaacgaaaaaaaatctcaaataaaacatgagataacattttaagacttccaaaaaaaaaaaaaaaaaaaa

SEQ ID NO: 257 - DNA, 1119 bp, Homo sapiens
ggcacgaggcctgggcggctccgctagctgtttttcgtcttccctaggctatttctgccgggcgctccgcgaagatgcagctcaagccgatggagatcaaccccgagatgctgaacaaagtgctgtcccggctgggggtcgccggccagtggcgcttcgtggacgtgctggggctggaagaggagtctctgggctcggtgccagcgcctgcctgcgcgctgctgctgctgtttcccctcacggcccagcatgagaacttcaggaaaaagcagattgaagagctgaagggacaagaagttagtcctaaagtgtacttcatgaagcagaccattgggaattcctgtggcacaatcggacttattcacgcagtggccaataatcaagacaaactgggatttgaggatggatcagttctgaaacagtttctttctgaaacagagaaaatgtcccctgaagacagagcaaaatgctttgaaaagaatgaggccatacaggcagcccatgatgccgtggcacaggaaggccaatgtcgggtagatgacaaggtgaatttccattttattctgtttaacaacgtggatggccacctctatgaacttgatggacgaatgccttttccggtgaaccatggcgccagttcagaggacaccctgctgaaggacgctgccaaggtctgcagagaattcaccgagcgtgagcaaggagaagtccgcttctctgccgtggctctctgcaaggcagcctaatgctctgtgggagggactttgctgatttcccctcttcccttcaacatgaaaatatatacccccccatgcagtctaaaatgcttcagtacttgtgaaacacagctgttcttctgttctgcagacacgccttcccctcagccacacccaggcacttaagcacaagcagagtgcacagctgtccactgggccattgtggtgtgagcttcagatggtgaagcattctccccagtgtatgtcttgtatccgatatctaacgctttaaatggctactttggtttctgtctgtaagttaagaccttggatgtggtttaattgtttgtcctcaaaaggaataaaacttttctgctgataagataaaaaaaaaaaaaaaaaa

SEQ ID NO: 258 - DNA, 2950 bp, Homo sapiens
gcggcccgtaggaaggtgctgtccgatcgatcgggataggagcggtccctgcgcttgctgctgggaagtggtacaatcatgtttgaaattaagaagatctgttgcatcggtgcaggctatgttggaggacccacatgtagtgtcattgctcatatgtgtcctgaaatcagggtaacggttgttgatgtcaatgaatcaagaatcaatgcgtggaattctcctacacttcctatttatgagccaggactaaaagaagtggtagaatcctgtcgaggaaaaaatctttttttttctaccaatattgatgatgccatcaaagaagctgatcttgtatttatttctgtgaatactccaacaaaaacctatggaatggggaaaggccgggcagcagatctgaagtatattgaagcttgtgctagacgcattgtgcaaaactcaaatgggtacaaaattgtgactgagaaaagcacagttccagtgcgggcagcagaaagtatccgtcgcatatttgatgcaaacacaaaacccaacttgaatttacaggtgctgtccaaccctgagtttctggcagagggaacagccatcaaggacctaaagaacccagacagagtactgattggaggggatgaaactccagagggccagagagctgtgcaggccctgtgtgctgtatatgagcactgggttcccagagaaaagatcctcaccactaatacttggtcttcagagctttccaaactggcagcaaatgcttttcttgcccagagaataagcagcattaactccataagtgctctgtgtgaagcaacaggagctgatgtagaagaggtagcaacagcgattggaatggaccagagaattggaaacaagtttctaaaagccagtgttgggtttggtgggagctgtttccaaaaggatgttctgaatttggtttatctctgtgaggctctgaatttgccagaagtagctcgttattggcagcaggtcatagacatgaatgactaccagaggaggaggtttgcttcccggatcatagatagtctgtttaatacagtaactgataagaagatagctattttgggatttgcattcaaaaaggacactggtgatacaagagaatcttctagtatatatattagcaaatatttgatggatgaaggtgcacatctacatatatatgatccaaaagtacctagggaacaaatagttgtggatctttctcatccaggtgtttcagaggatgaccaagtgtcccggctcgtgaccatttccaaggatccatatgaagcatgtgatggtgcccatgctgttgttatttgcactgagtgggacatgtttaaggaattggattatgaacgcattcataaaaaaatgctaaagccagcctttatcttcgatggacggcgtgtcctggatgggctccacaatgaactacaaaccattggcttccagattgaaacaattggcaaaaaggtgtcttcaaagagaattccatatgctccttctggtgaaattccgaagtttagtcttcaagatccacctaacaagaaacctaaagtgtagagattgccatttttatttgtgatttttttttttttttggtacttcaggatagcaaatatctatctgctattaaatggtaaatgaaccaagtgtttttttttgttttttttttgagacagagtctcactgttgcccaggctggagtgcagtggtgcaatctcggctcactgcaagctctgcttcccaggttcacgccattctcctggctcagcctcccaagtagctgggactacaggcacccgccacagtgcctgggctaattttttgtatttttagtagagacagggtttcaccatgtgagccaggatggtctcaatctcctgaccttgtgaaccacccgtctcggcctcccaaagtgctgggattacaggtgtgagccaccacgcctgggcccatgaaccaagtgtttttaaggaaacaaaactatttttttaatcatcagatttatactagctatatggatattagcatatctggtaattatgaatctagaatttttttacatatttttataatactgttagctcagttattggatgagtgaaagataatcatgttggttttaatagtgtcaatttttgtaaaataaaaattaaacttcaaactctttactttataaattgtccataggccacactttaatatcacattataaagggaaggacagtcttcattcctcctggttattggtttgtttgtcattaaagatatattttgaatccatgaaattgctatgctaaacagcctttacatgtatggtctggttaaagttcctttgttccttttgttttaataaaatgtgtcactgattttttagctcaaaatcatcactgttaatttccagtcaccccaaatatggttaaaagatttttttttttaatcatgaagagaaaattagtagcatttctttctctccccattatttattggttttcctcactaatctttttttttttagtccaaaagccaaaaatatttatcttggttttacattttaatttccattcttaattgtaatttttttctttaaataaggaaaccaatataatctcatgtataaaaacttaaatattttacaagttacatatagcatcattctaaaataagaattttttttgttttctgtctgcttttttcttatgtctcttgttgagttttatattttcagtggttatttttgcttgtgttagatcattattaaaatatatccaatgtccctttgatacttgtgctctgctgagaatgtacagtttgcattaaacatcccaggtctcatccttcaggaattttgcagttcaatgagaagagggagacaaatataaagatgaggacagaagcatctctacagatgaaaattacataaataaaacattctccatcaacaaaa

SEQ ID NO: 259 - DNA, 2239 bp, Homo sapiens
cgtccgtgacaagatgaagctcatcatcctggagcactattctcaggcgagcgagtgggcggctaaatacatcaggaaccgtatcatccagtttaacccagggccagagaagtacttcaccctggggctccccactgggagtaccccacttggctgctacaagaagctgattgaatactataagaatggggacctgtcctttaaatatgtgaagaccttcaacatggatgagtacgtgggccttcctcgagaccacccggagagttaccactccttcatgtggaacaacttcttcaagcacattgacatccacccagaaaacacccacattctggatgggaatgcagtcgacctacaggcagaatgtgatgcctttgaagagaagatcaaggctgcaggtgggatcgagctatttgttggaggcatcggccctgatggacacattgccttcaacgagccaggctccagtctggtgtccaggacccgtgtgaagacgctggccatggataccatcctggccaatgctaggttcttcgatggagaactcaccaaggtgcccaccatggccttgacggtgggggtgggcactgtcatggatgctagagaggtgatgatccttatcacaggtgctcacaaggcatttgctctgtacaaggccatcgaggagggagtgaaccacatgtggaccgtgtctgccttccagcagcatccccgcaccgtgtttgtgtgtgacgaggatgccaccttggagctgaaagtgaagactgtcaagtatttcaaaggtttaatgcttgttcataacaagttggtggaccccttgtacagtatcaaagagaaagaaactgagaaaagccaatcttcgaagaaaccatacagcgattagcctgtgctgggacctagtgtcaagtacccatagggaaaggcaggtctttctggaaattgtctttagaagaaagaattgtatttctttaatctagtatggttactccagataagtgggtgaacttattgttcttggccatgaggctgggagcctagtcacggagtttagctatagggagaatgtttgtaacttaatcagaaaaaaaatatctgcaaaatgtactccatcattttgatgtctgccaaacccaggttgggagttttaaactttttgttctgcttcagccatggttcacacatatgacacactcccgtcaggaatttctctccttacacgcactgattttcaagtgggagggaattaggggcttatgtatattggataccacctcttgagagtccttcttgcacaggcctgccccttggttgagaaccattgttccaagtgaaggcacaaactctcaatatctaaaataagtgcaaggaagcagtctctttggtcagtaacaagtgcaatggaaagaaaacgatcccttccttcttccactttcacagcttttctctgaactaggagaacctgggggtggatttgggtgggtggggccaaagaggaggcttctattgataaatccagagcctcaaggggcccagccacgtcaaacttctctccctcagggactctccagcaccaaaaggcagaaggtggaagccgtttttcccccagagccctgtgtttttgtgaaaggcctcactgtggctcctctgttttacatactcattagtaagtgggaggtccactggggcaacagacactgccacaatttcagtgttgtgttcagccaaggggacggtctggacaggcagcttaagtgtgagtttagtcacaactcctgagtgtcccgctctcctgcttacctaggaggtgagtgccaggaaaatacaccaaatgcttctagtattgtttccccacttaaaatagtcctgcttaaattcacatggtgtggtctgatgttctgagagcatcaggaaatacaacccttttgcccatttacccttctccccggatcccaaggtggtctgttgctctggcttcctttcattgtcttaggccttcatggagtggatgctgcctcctcctggctgtttttgtgcctgtttgaagctactgctgcctccatttctgggaaagacctttgagagcctagcccaggcctaagggctatgtttggtaccagtgttttgtctttagcttttctatgtgattgtgccgtcattctgttttaagctcatggatcaatggatttgtttacaatgtgatattttctattaaatccagtattttcaaaaaaaaaaaaaa

SEQ ID NO: 260 - DNA, 1743 bp, Homo sapiens
ggcgcggggacgcgggtttctgcctcaggccctgccctgctctactctgcgctctctgcccgcgccgccgccgcctcagcctcggccctgcgctgcgcgcccggcccgtgctgccatggcctgccgcccgcgaagcccgccgaggcatcagagccgctgcgacggtgacgccagcccgccgtcccccgcgcgatggagcctgggacggaagcgcagagccgacggcaggcgctggaggcccgaagacgccgaggaggcagagcaccgcggcgccgagcgcagacccgagagctttaccactcctgaaggccctaaaccccgttccagatgctctgactgggcaagtgcagttgaagaagatgaaatgaggaccagagttaacaaagaaatggcaagatataaaaggaaactcctcatcaatgactttggaagagagagaaaatcatcatcaggaagttctgattcaaaggagtctatgtctactgtgccggctgactttgagacagatgaaagtgtcctaatgaggagacagaagcagatcaactatgggaagaacacaattgcctacgatcgttatattaaagaagtcccaagacaccttcgacaacctggcattcatcccaagacccctaataaatttaagaagtatagtcgacgttcatgggaccagcaaatcaaactctggaaggtggctctgcatttttgggatcctccagcggaagaaggatgtgatttgcaagaaatacaccctgtagaccttgaatctgcagaaagcagctccgagccccagaccagctctcaggatgactttgatgtgtactctggcacacccaccaaggtgagacacatggacagtcaagtggaggatgagtttgatttggaagcttgtttaactgaacccttgagagacttctcagccatgagctaactgccccctggcggccaggaagagaaacagctcctccccgactaggtggaaggctggccaggcaccaagcatgtgtgtgcacttgtacctggtggtttctctgttagcagtccattagctcatgctgaattatttttgccttactttcttaagaaacattaattttatgtatagtgagtatattttgcatgttttaaattgtaaatggagctaagtccaagaaagtacttgaagctctcttccagcgagcttaattgcgtaatccctgttgtcctccagggtaagctgacacgtctacataactggttttccacaggcatcttcagttattgcttgtcaggtggactgttttggatttaaccatgtaatccatgggaccaattgagagtcagctacttttataggcatcaaagtattctcagacacctttaatatctttatggaaacttaatttttggccttttatcaatatgtcataacagcattctgaagtcagacattgttaaattgagctattaaactaatgagttttatgtaagttatatggtcttaatttggtacttgtaaatagcactagttagactctttagaatactccaagagttagggcagcagagtggagcgatttagaaagaacattttaaaacaatcagttaatttaccatgtaaaattgctgtaaatgataatgtgtacagattttctgttcaaatattcaattgtaaacttcttgttaagactgttacgtttctattgcttttgtatgggatattgcaaaaataaaaaggaaagaaccctcaaaaaaaaaaaaaaaaaa

SEQ ID NO: 261 - DNA, 1266 bp, Homo sapiens
atgttccgagcggcggctccggggcagctccggcgggcggcctcattgctacgatttcagagtaccctggtaatagctgagcatgcaaatgattccctagcacccattactttaaataccattactgcagccacacgccttggaggtgaagtgtcctgcttagtagctggaaccaaatgtgacaaggtggcacaagatctctgtaaagtagcaggcatagcaaaagttctggtggctcagcatgatgtgtacaaaggcctacttccagaggaactgacaccattgattttggcaactcagaagcagttcaattacacacacatctgtgctggagcatctgccttcggaaagaaccttttgcccagagtagcagccaaacttgaggttgccccgatttctgacatcattgcaatcaagtcacctgacacatttgtgagaactatttatgcaggaaatgctctatgtacagtgaagtgtgatgagaaagtgaaagtgttttctgtccgtggaacatcctttgatgctgcagcaacaagtggcggtagtgccagttcagaaaaggcatcaagtacttcaccagtggaaatatcagagtggcttgaccagaaattaacaaaaagtgatcgaccagagctaacaggtgccaaagtggtggtatctggtggtcgaggcttgaagagtggagagaactttaagttgttatatgacttggcagatcaactacatgctgcagttggtgcttcccgtgctgctgttgatgctggctttgttcccaatgacatgcaagttggacagacgggaaaaatagtagcaccagaactttatattgctgttggaatatctggagccatccaacatttagctgggatgaaagacagcaagacaattgtggcaattaataaagacccagaagctccaattttccaagtggcagattatggaatagttgcagatttatttaaggtagttcctgaaatgactgagatattgaagaaaaaatgaatcaggatcatgccttaaaaagaaaacttttgttaaagtattccactgaaatcacagatatttgtgggtattataacaatcattggaaagcatggagagctacatttcataatttgagggaaaatttctaacagatgccagaatgcttgtttatgggattgctgtgtttccttttaattatttgtggttccaaacaattattgtttgaacttttttaattctgtactaaaatctataataaagcttttccacagctttaaaact

SEQ ID NO: 262 - DNA, 3091 bp, Homo sapiens
tttaaacgagctgtattaccccgcacagtgcaggagaaaagataattggctcaggtctcggctctgccatctaccacctgtggagccttagataagtcagttcttatctctgtcactcaacggtctcggtcttgtcatcttttacatggaatgtcatgaaatatacagtacattgcaggaactgcctcaggtaaagacttctagggttcagtaggtctcagtcgatccctctgagaaaggccgcaccctaaatgcacagactctgactctaaggggatggggtcggggaatctgcattttagtagcttctcaggtgattcagatgctcagtcaggattgagaaaccaggactcttcccagccctcctgttctctgatccacttctctgcttcctccacgtcctaacgattctccagttcccgcacagcaggagcgaagggaagaggggagagaaggcaccgctaaggaccgctggccccgccaggcggccgacctccccattccaggggcgccagccggcggattacataacgggctcggggcgcgttctcgcgaggtttccaccgccccctcctcgctccacgtcagagggaaccgggcggagcggccaacatggcggaacgcaggagacacaagaagcggatccaggaagttggtgaaccatctaaagaagagaaggctgtggccaagtatcttcgattcaactgtccaacaaagtccaccaatatgatgggtcaccgggttgattattttattgcttcaaaagcagtggactgtcttttggattcaaagtgggcaaaggccaagaaaggagaggaagctttatttacaaccagggagtctgtggttgactactgcaacaggcttttaaagaagcagttttttcaccgagccctaaaagtaatgaaaatgaaatatgataaagacataaagaaagaaaaagataaaggaaaagctgaaagtggaaaagaagaagataaaaagagcaagaaagaaaatataaaggatgagaagacaaaaaaagaaaaagagaaaaaaaaagatggtgaaaaggaagaatccaaaaaggaggaaactccaggaactcctaaaaagaaggaaactaagaaaaaattcaaacttgagccacatgatgatcaggtttttctggatggaaatgaggtgtatgtatggatctatgacccagttcactttaaaacatttgtcatgggattaattcttgtgattgcagtaatagcggccaccctcttccccctttggccagcagaaatgagagtaggtgtttattacctcagtgtgggtgcaggctgttttgtagccagtattcttctccttgctgttgctcgatgcattctatttctcatcatttggctcataactggaggaaggcaccacttttggttcttgccaaatctgactgctgatgtgggcttcattgactccttcaggcctctgtacacacatgaatacaaaggaccaaaagcagacttaaagaaagatgagaagtctgaaaccaaaaagcaacagaagtccgacagtgaggaaaagtcagacagtgagaaaaaggaagatgaggaggggaaagtaggaccaggaaatcatggaacagaaggctcggggggagaacggcattcagacacggacagtgacaggagggaagatgatcgatcccagcacagtagtggaaatggaaatgattttgaaatgataacaaaagaggaactggaacagcaaacagatggggattgtgaagaggatgaggaagaggaaaatgatggagaaacacctaaatcttcacatgaaaaatcataatctgactaattttgggactgaatgaataagtacaagaggttggattttctatgttggctgattaccatattgaacacatggcatttgtagcattctttaaatctatctactgagatgtatttgacattcaagcagttatattcggtccttcattttatagaatattggcactattattggtacagtttaaagccattaatatgttttatccatttgataattttacagtaagtaggtctcattcattttgacagttatcaaagatgtactttccacagttaaatttacattaatggcaatttttgatagttttatggctttttactgttagactaatcaaaaataactttaaaaggaacaaagaaactccaacatttcacattatgcatagttatgtagccatttcacagtttctttaagatgtgtaaactcattgtccttgatagtttttatttttcattataaaattataccaggagatttcttttaagattctgagttagcagagttcaaaactattttgtggaaacaagccaactagtaacaatgcagcaacacttctggtttagctaaattatttttccaatgtaggaaatccacactgatttgtacgtctgactgagagaaagatggtcgtctccagcagagaaagtgaacagcatttgttggaaggtgatggctctccctcctccctccccatttcattggcgtaacgtaaagtgtattctgtacataatttacaaataaaacattttattttaattgttacttattatttagatatttctcaacacttaaattcataaaattaagaccatgtaagggtatgtttttagagaaatggaagtttgagtaacccacagaacatctgtgatctttctacagcagcttcagttttgtgccaacattccatgtattttgaatatgagcaaaaactgatcttaagagcagacttaaagtagctttgtacgccttaatgttcattttgatttattttaaatctttacattcagaaatgagatactgtattatcagaccaggaggcattgctgtgaaagataatttcctattctaaaatatcaaatttaaaataaagataatgaaagaaaacataagagaactattggactctaattgctttgaactagttttgcagtttgactttacgtcttatacatcttagttacaagtctttggaaactcttgtttacttatgagcataatcattccttggagttatactaactaataatgaatattaaatgatttttcttcagtc

SEQ ID NO: 263 - DNA, 1778 bp, Homo sapiens
acgcttgtcacttacctgagcgcagccaatcagcacctagaggttgggctactttcggccaaaggagaacggggacttgtgggggacgctccctgcgcaccaatgaatgtgcatggagatggagaggcgggcctgcaagtgcgaacaagccaatcacggaatcccggcggccggcggcccgggaggcagtcgcgcgctcgcatccccaagatggcggccgttaaggacagttgtggcaaaggagaaatggccacagggaatgggcggcggctccacctggggattcctgaggccgtgtttgtggaagatgtagattccttcatgaaacagcctgggaatgagactgcagatacagtattaaagaagctggatgaacagtaccagaagtataagtttatggaactcaaccttgctcaaaagaaaagaaggctaaaaggtcagattcctgaaattaaacagactttggaaattctaaaatacatgcagaagaaaaaagagtccaccaactcaatggagaccagattcttgctggcagataacctgtattgcaaagcttcagttcctcctaccgataaagtgtgtctgtggttgggggctaatgtaatgcttgaatatgatattgatgaagctcaggcattgttggaaaagaatttatcgactgccacaaagaatcttgattccctggaggaagaccttgactttcttcgagatcaatttactaccacagaagtcaatatggccagggtttataattgggatgtaaaaagaagaaacaaggatgactctaccaagaacaaagcataatgctggcaattaaaaatgtggtttagttttccaaacatgttatcttaaatacccctttatccttacaggttgacataactttgaatgttttaacagcaagaattttaagaaaagataaacaccattttatttatttataaaaacaaaattagtttcaaatatttttgacattgtgatttttttttccacatttctcagcaaagctaatggtattttaatcattatttttgcctgtcataagaaaactcttagctgaaatggccgaaaactgtgagacatgctatggaagctgaatgccggacgctagcacagtttactttttccctttctaatcggctgatgttactctcacttgatgtggttaaaccattttagaggtagagaagacagacagtttgaatatttgtaaacttgtttttctttggtatatttaggacttagtggtcctctgttgctattgtcttctataagtggagtttcatgacttactgcttaacgaataactaactactatgatattctggacattttaggaaatggtaatttgccttgctacacattaagagggctattaagactacattttttctaacctcagataagtgcagtgtctttgcaatgccaacataagggagatcttggccaacgtgaaataaaattactcattcaaaactctgcctaaggtgattttgtagttcttaacagttctccagagcatcttgaacaggaatattaagataaatgtgaatctgcaatggctgaaaagagttgtgagcttttttattcatgataaaaccttataggaatagtataaaaaatccctgtggaaagctactagtacattgaccagcgctgggtgatacagattctgataaaaacataaatgtattagttcatctccatgtagtaaaaagtatacttatacaatgttttgtacttgtatttcatgaaattaaaacagtgatgctaaaacg

SEQ ID NO: 264 - DNA, 1649 bp, Homo sapiens
agaggtgagagagtcgcgcccgggagtccgccgcctgcgccaggatggagttcgtgaaatgccttggccaccccgaagagttctacaacctggtgcgcttccggatcgggggcaagcggaaggtgatgcccaagatggaccaggactcgctcagcagcagcctgaaaacttgctacaagtatctcaatcagaccagtcgcagtttcgcagctgttatccaggcgctggatggggaaatgcgcaacgcagtgtgcatattttatctggttctccgagctctggacacactggaagatgacatgaccatcagtgtggaaaagaaggtcccgctgttacacaactttcactctttcctttaccaaccagactggcggttcatggagagcaaggagaaggatcgccaggtgctggaggacttcccaacgatctcccttgagtttagaaatctggctgagaaataccaaacagtgattgccgacatttgccggagaatgggcattgggatggcagagtttttggataagcatgtgacctctgaacaggagtgggacaagtactgccactatgttgctgggctggtcggaattggcctttcccgtcttttctcagcctcagagtttgaagaccccttagttggtgaagatacagaacgtgccaactctatgggcctgtttctgcagaaaacaaacatcatccgtgactatctggaagaccagcaaggaggaagagagttctggcctcaagaggtttggagcaggtatgttaagaagttaggggattttgctaagccggagaatattgacttggccgtgcagtgcctgaatgaacttataaccaatgcactgcaccacatcccagatgtcatcacctacctttcgagactcagaaaccagagtgtgtttaacttctgtgctattccacaggtgatggccattgccactttggctgcctgttataataaccagcaggtgttcaaaggggcagtgaagattcggaaagggcaagcagtgacccttatgatggatgccaccaatatgccagctgtcaaagccatcatatatcagtatatggaagagatttatcatagaatccccgactcagacccatcttctagcaaaacaaggcagatcatctccaccatccggacgcagaatcttcccaactgtcagctgatttcccgaagccactactcccccatctacctgtcgtttgtcatgcttttggctgccctgagctggcagtacctgaccactctctcccaggtaacagaagactatgttcagactggagaacactgatcccaaatttgtccatagctgaagtccaccataaagtggatttactttttttctttaaggatggatgttgtgttctctttatttttttcctactactttaatccctaaaagaacgctgtgtggctgggacctttaggaaagtgaaatgcaggtgagaagaacctaaacataaaaggaaagggtgcctcatcccagcaacctgtccttgtgggtgatgatcactgtgctgcttgcggctcatggcagagcattcagtgccacggtttaggtgaagtcgctgcatatgtgactgtcatgagatcctacttagtatgatcctggctagaatgataattaaaagtatttaatttg

SEQ ID NO: 265 - DNA, 1804 bp, Homo sapiens
gtatcactcagaatctggcagccagttccgtcctgacagagttcacagcatatattggtggattcttgtccatagtgcatctgctttaagaattaacgaaagcagtgtcaagacagtaaggattcaaaccatttgccaaaaatgagtctaagtgcatttactctcttcctggcattgattggtggtaccagtggccagtactatgattatgattttcccctatcaatttatgggcaatcatcaccaaactgtgcaccagaatgtaactgccctgaaagctacccaagtgccatgtactgtgatgagctgaaattgaaaagtgtaccaatggtgcctcctggaatcaagtatctttaccttaggaataaccagattgaccatattgatgaaaaggcctttgagaatgtaactgatctgcagtggctcattctagatcacaaccttctagaaaactccaagataaaagggagagttttctctaaattgaaacaactgaagaagctgcatataaaccacaacaacctgacagagtctgtgggcccacttcccaaatctctggaggatctgcagcttactcataacaagatcacaaagctgggctcttttgaaggattggtaaacctgaccttcatccatctccagcacaatcggctgaaagaggatgctgtttcagctgcttttaaaggtcttaaatcactcgaataccttgacttgagcttcaatcagatagccagactgccttctggtctccctgtctctcttctaactctctacttagacaacaataagatcagcaacatccctgatgagtatttcaagcgttttaatgcattgcagtatctgcgtttatctcacaacgaactggctgatagtggaatacctggaaattctttcaatgtgtcatccctggttgagctggatctgtcctataacaagcttaaaaacataccaactgtcaatgaaaaccttgaaaactattacctggaggtcaatcaacttgagaagtttgacataaagagcttctgcaagatcctggggccattatcctactccaagatcaagcatttgcgtttggatggcaatcgcatctcagaaaccagtcttccaccggatatgtatgaatgtctacgtgttgctaacgaagtcactcttaattaatatctgtatcctggaacaatattttatggttatgtttttctgtgtgtcagttttcatagtatccatattttattactgtttattacttccatgaattttaaaatctgagggaaatgttttgtaaacatttattttttttaaagaaaagatgaaaggcaggcctatttcatcacaagaacacacacatatacacgaatagacatcaaactcaatgctttatttgtaaatttagtgtttttttatttctactgtcaaatgatgtgcaaaaccttttactggttgcatggaaatcagccaagttttataatccttaaatcttaatgttcctcaaagcttggattaaatacatatggatgttactctcttgcaccaaattatcttgatacattcaaatttgtctggttaaaaaataggtggtagatattgaggccaagaatattgcaaaatacatgaagcttcatgcacttaaagaagtatttttagaataagaatttgcatacttacctagtgaaacttttctagaattatttttcactctaagtcatgtatgtttctctttgattatttgcatgttatgtttaataagctactagcaaaataaaacatagcaaatgaaaaaaaaaaaaaaaaaaaaaaaaaaaaaaaa

SEQ ID NO: 266 - DNA, 1755 bp, Homo sapiens
agctttgggagggccggccccgggatgctacacacaacccagctgtaccagcatgtgccagagacaccctggccaatcgtgtactcgccgcgctacaacatcaccttcatgggcctggagaagctgcatccctttgatgccggaaaatggggcaaagtgatcaatttcctaaaagaagagaagcttctgtctgacagcatgctggtggaggcgcgggaggcctcggaggaggacctgctggtggtgcacacgaggcgctatcttaatgagctcaagtggtcctttgctgttgctaccatcacagaaatcccccccgttatcttcctccccaacttccttgtgcagaggaaggtgctgaggccccttcggacccagacaggaggaaccataatggcggggaagctggctgtggagcgaggctgggccatcaacgtggggggtggcttccaccactgctccagcgaccgtggcgggggcttctgtgcctatgcggacatcacgctcgccatcaagtttctgtttgagcgtgtggagggcatctccagggctaccatcattgatcttgatgcccatcagggcaatgggcatgagcgagacttcatggacgacaagcgtgtgtacatcatggatgtctacaaccgccacatctacccaggggaccgctttgccaagcaggccatcaggcggaaggtggagctggagtggggcacagaggatgatgagtacctggataaggtggagaggaacatcaagaaatccctccaggagcacctgcccgacgtggtggtatacaatgcaggcaccgacatcctcgagggggaccgccttggggggctgtccatcagcccagcgggcatcgtgaagcgggatgagctggtgttccggatggtccgtggccgccgggtgcccatccttatggtgacctcaggcgggtaccagaagcgcacagcccgcatcattgctgactccatacttaatctgtttggcctggggctcattgggcctgagtcacccagcgtctccgcacagaactcagacacaccgctgcttccccctgcagtgccctgacccttgctgccctgcctgtcacgtggccctgcctatccgccccttagtgctttttgttttctaacctcatggggtggtggaggcagccttcagtgagcatggaggggcagggccatccctggctggggcctggagctggcccttcctctacttttccctgctggaagccagaagggcttgaggcctctatgggtgggggcagaaggcagagcctgtgtcccagggggacccacacgaagtcaccagcccataggtccagggaggcaggcagttaactgagaattggagaggacaggctaggtcccaggcacagcgagggccctgggcttggggtgttctggttttgagaacggcagacccaggtcggagtgaggaagcttccacctccatcctgactaggcctgcatcctaactgggcctccctccctccccttggtcatgggatttgctgccctctttgccccagagctgaagagctataggcactggtgtggatggcccaggaggtgctggagctaggtctccaggtgggcctggttcccaggcagcaggtgggaaccctgggcctggatgtgaggggcggtcaggaaggggtacaggtgggttccctcatctggagttccccctcaataaagcaaggtctggacctgcaaaaaaaaaaaaaaaaaaaaaaaaaaaaaaaaaaaa

SEQ ID NO: 267 - DNA, 4547 bp, Homo sapiens
cggatccactagtccagtgtggtggaattcggcttcatcatcatgagtggccttggggacagttcatccgaccctgctaacccagactcacataagaggaaaggatcgccatgtgacacactggcatcaagcacggaaaagaggcgcagggagcaagaaaataaatatttagaagaactagctgagttactgtctgccaacattagtgacattgacagcttgagtgtaaaaccagacaaatgcaagattttgaagaaaacagtcgatcagatacagctaatgaagagaatggaacaagagaaatcaacaactgatgacgatgtacagaaatcagacatctcatcaagtagtcaaggagtgatagaaaaggaatccttgggacctcttcttttggaggctttggatggatttttctttgttgtgaactgtgaagggagaattgtatttgtgtcagagaatgtaaccagctacttaggttacaatcaggaggaattaatgaatacgagcgtctacagcatactgcacgtgggggatcatgcagaatttgtgaagaatctgctaccaaaatcactagtaaatggagttccttggcctcaagaggcaacacgacgaaatagccatacctttaactgcaggatgctaattcaccctccagatgagccagggaccgagaaccaagaagcttgccagcgttatgaagtaatgcagtgtttcactgtgtcacagccaaaatcaattcaagaggatggagaagatttccagtcatgtctgatttgtattgcacggcgattacctcggcctccagctattacgggtgtagaatcctttatgaccaagcaagatactacaggtaaaatcatctctattgatactagttccctgagagctgctggcagaactggttgggaagatttagtgaggaagtgcatttatgcttttttccaacctcagggcagagaaccatcttatgccagacagctgttccaagaagtgatgactcgtggcactgcctccagcccctcctatagattcatattgaatgatgggacaatgcttagcgcccacaccaagtgtaaactttgctaccctcaaagtccagacatgcaacctttcatcatgggaattcatatcatcgacagggagcacagtgggctttctcctcaagatgacactaattctggaatgtcaattccccgagtaaatccctcggtcaatcctagtatctctccagctcatggtgtggctcgttcatccacattgccaccatccaacagcaacatggtatccaccagaataaaccgccagcagagctcagaccttcatagcagcagtcatagtaattctagcaacagccaaggaagtttcggatgctcacccggaagtcagattgtagccaatgttgccttaaacaaaggacaggccagttcacagagcagtaaaccctctttaaacctcaataatcctcctatggaaggtacaggaatatccctagcacagttcatgtctccaaggagacaggttacttctggattggcaacaaggcccaggatgccaaacaattcctttcctcctaatatttcgacattaagctctcccgttggcatgacaagtagtgcctgtaataataataaccgatcttattcaaacatcccagtaacatctttacagggtatgaatgaaggacccaataactccgttggcttctctgccagttctccagtcctcaggcagatgagctcacagaattcacctagcagattaaatatacaaccagcaaaagctgagtccaaagataacaaagagattgcctcaactttaaatgaaatgattcaatctgacaacagctctagtgatggcaaacctctggattcagggcttctgcataacaatgacagactttcagatggagacagtaaatactctcaaaccagtcacaaactagtgcagcttttgacaacaactgccgaacagcagttacggcatgctgatatagacacaagctgcaaagatgtcctgtcttgcacaggcacttccaactctgcctctgctaactcttcaggaggttcttgtccctcttctcatagctcattgacagcacggcataaaattctacaccggctcttacaggagggtagcccctcagatatcaccactttgtctgtcgagcctgataaaaaggacagtgcatctacttctgtgtcagtgactggacaggtacaaggaaactccagtataaaactagaactggatgcttcaaagaaaaaagaatcaaaagaccatcagctcctacgctatcttttagataaagatgagaaagatttaagatcaactccaaacctgagcctggatgatgtaaaggtgaaagtggaaaagaaagaacagatggatccatgtaatacaaacccaaccccaatgaccaaacccactcctgaggaaataaaactggaggcccagagccagtttacagctgaccttgaccagtttgatcagttactgcccacgctggagaaggcagcacagttgccaggcttatgtgagacagacaggatggatggtgcggtcaccagtgtaaccatcaaatcggagatcctgccagcttcacttcagtccgccactgccagacccacttccaggctgaatagattacctgagctggaattggaagcaattgataaccaatttggacaaccaggaacaggcgatcagattccatggacaaataatacagtgacagctataaatcagagtaaatcagaagaccagtgtattagctcacaattagatgagcttctctgtccacccacaacagtagaagggagaaatgatgagaaggctcttcttgaacagctggtatccttccttagtggcaaagatgaaactgagctagctgaactagacagagctctgggaattgacaaacttgttcaggggggtggattagatgtattatcagagagatttccaccacaacaagcaacgccacctttgatcatggaagaaagacccaacctttattcccagccttactcttctccttttcctactgccaatctccctagccctttccaaggcatggtcaggcaaaaaccttcactggggacgatgcctgttcaagtaacacctccccgaggtgctttttcacctggcatgggcatgcagcccaggcaaactctaaacagacctccggctgcacctaaccagcttcgacttcaactacagcagcgattacagggacaacagcagttgatacaccaaaatcggcaagctatcttaaaccagtttgcagcaactgctcctgttggcatcaatatgagatcaggcatgcaacagcaaattacacctcagccacccctgaatgctcaaatgttggcacaacgtcagcgggaactgtacagtcaacagcaccgacagaggcagctaatacagcagcaaagagccatgcttatgaggcagcaaagctttgggaacaacctccctccctcatctggactaccagttcaaacggggaacccccgtcttcctcagggtgctccacagcaattcccctatccaccaaactatggtacaaatccaggaaccccacctgcttctaccagcccgttttcacaactagcagcaaatcctgaagcatccttggccaaccgcaacagcatggtgagcagaggcatgacaggaaacataggaggacagtttggcactggaatcaatcctcagatgcagcagaatgtcttccagtatccaggagcaggaatggttccccaaggtgaggccaactttgctccatctctaagccctgggagctccatggtgccgatgccaatccctcctcctcagagttctctgctccagcaaactccacctgcctccgggtatcagtcaccagacatgaaggcctggcagcaaggagcgataggaaacaacaatgtgttcagtcaagctgtccagaaccagcccacgcctgcacagccaggagtatacaacaacatgagcatcaccgtttccatggcaggtggaaatacgaatgttcagaacatgaacccaatgatggcccagatgcagatgagctctttgcagatgccaggaatgaacactgtgtgccctgagcagataaatgatcccgcactgagacacacaggcctctactgcaaccagctctcatccactgaccttctcaaaacagaagcagatggaacccagcaggtgcaacaggttcaggtgtttgctgacgtccagtgtacagtgaatctggtaggcggggacccttacctgaaccagcctggtccactgggaactcaaaagcccacgtcaggaccacagaccccccaggcccagcagaagagcctccgtcagcagctactgactgaataaccacttttaaaggaatgtgaaatttaaataatagacatacagagatatacaaatatattatatatttttctgagatttttgatatctcaatctgcagccattcttcaggtcgtagcatttggagcaaaaaaaaaaaaaaaaatcgatgtcgagagtacttctagagggcccgtttaaac

SEQ ID NO: 268 - DNA, 2779 bp, Homo sapiens
gcgccgggccgggccgggcagggcgcgggcggctaggggctccgagagcggcggccccggcccgcggccccaccatgccccagctcggcggcgggggcggcggcggcggcggcggcagcgggggaggcggcggctccagcgccggggcggccggcggaggggacgacctcggggcgaacgacgagctgatccccttccaggacgaggggggcgaggagcaggagccgagcagcgatagcgcctcggcgcagcgggacctagacgaggtcaagtcgtccctggtcaacgagtcggagaaccagagcagcagctcggactcggaggcggagaggcgcccgcagcccgtccgggacactttccagaagccgcgggactatttcgccgaagtgagaaggcctcaggacagcgcgttctttaaaggacccccgtaccctgggtaccccttcctgatgatcccggacctgagcagcccgtacctctccaacggacccctgtctcccggaggagcgcgcacctacctgcagatgaaatggcccctcctcgatgtcccctccagcgccacagtcaaggacacgaggtcaccatctccagcacacttgtctaataaagttcctgtcgttcagcacccgcatcacatgcatccgctgactcccctcatcacctacagcaatgaccacttctcccccggctcccctcccacccacctctccccagagatcgatccaaagacaggaatcccccggccccctcacccatccgagctgtcaccgtattacccactctctcccggagctgtcggacaaatcccccaccccctcggctggctcgtcccacagcaaggccagcccatgtactcccttcctcccggtggcttccggcacccttaccccgccctcgccatgaacgcctcgatgtccagcctggtctccagtcggttctctcctcacatggtggctcctgcccaccctggcctgcccacctcagggatcccccaccctgccatcgtctcccccatcgtcaagcaggaaccggcaccccccagcctgagccctgcagtgagcgtgaaatcaccagtcaccgtgaaaaaggaggaggaaaagaagccccacgtgaagaagcctctgaatgccttcatgttgtatatgaaggagatgagggccaaggtggtggctgagtgcaccctgaaggaaagtgcagccattaaccagatccttggaagaaagtggcacaacctgtctcgagaagaacaggccaagtactacgagctggcccggaaggagcggcagcttcactcgcagctctacccaacctggtcagcccgggacaactatggtaagaaaaagaagaggaagagagaaaagcagctgtcccagacacagtcacagcagcaagtccaggaggcagagggtgccctggcctccaagagcaagaagccatgtgttcagtacctgccccccgagaagccctgtgacagccctgcctcctcccacgggagcatgctggactccccggccactccctctgcagctttggcctcaccagctgcccctgctgccacccattcggagcaagcccagcccctctccctcaccaccaaaccagaaacccgggcccagctggctctccactctgccgccttcctgtcggctaaggctgcagcctcctcctctgggcagatgggcagccagcctcccctcctgtcccggcccctcccccttgggtccatgcccacagctctgctggcctctcccccgtccttccccgccacgctccatgcccaccaggccctcccggtgctacaggcccagcctctttccctggtcaccaagtctgcccactaagctccccccgacccctgcaggctgtcacatgactcattgagtagtaatgattcagaagaaaaagaaaaaggagactttattggtcaatatttgaccactctggactgttctgtaaagtggctggtaacaacagcactttacagtttgtagatgtaaccagtagctgatcttaaggcttttttaaaaaacaaaacaaaacaacaaaaaaaaatctttataagaaagagaactgaaaagtagcgtgctattcgtcctgtaggtgctgtggtggatggacctgggcagagggcacttctctctcttacctctcttgcactttctgtctcctgtctcttctcgcccctgccgcctgccccagcttccccgactccatctgcagctctgccattgtgacatttcctgttacccagcccaagttttcatcgtctgctcaataccgtgggttcttcttcgtcctctgtcctctgcccagtgtgaggccatcaccatgtgagaagacatcttggcctgatttgctgccaccagcgtcccctccctcagtgggcccgaactcgccagccccagctttcagtggagaaagcggtcctctgaaatggtttcctcccaacccccgcatttaaagggactcaaggtgcctgccacttcctcagcgaagaagtctgtgttcctccccgtccttgccagtggcgatcatcccttcacaatcccagagtggcaggcgggaccagccccatggtctggctcctgtcacctgggtccgtgccagcacaatctgccaaagttctagagaccctgttcccttccccatcacctcacatgcttcttctgtgtgtatttctttttgtttttatggtttttggagcaatttaaactcccagttgtttattttcacaaaagaaaataaaattgcagttgcaagaaaaaaaaaaaaaaaaaaa

SEQ ID NO: 269 - DNA, 1999 bp, Homo sapiens
gagggaggggccgccggggaagaggaggaggaaggaaagaaagaaagcgagggagggaaagaggaggaaggaagatgcgagaaggcagaggaggagggagggagggaaggagcgcggagcccggcccggaagctaggtgagtgtggcatccgagctgagggacgcgagcctgagacgccgctgctgctccggctgagtatctagcttgtctccccgatgggattcccgtccaagctatctcgagcctgcagcgccacagtccccggccctcgcccaggttcactgcaaccgttcagaggtccccaggagctgctgctggcgagcccgctactgcagggacctatggagccattccgtagtgccatcccgagcaacgcactgctgcagcttccctgagcctttccagcaagtttgttcaagattggctgtcaagaatcatggactgttattatatgccttgttttctgtcaagacaccatgattcctggtaaccgaatgctgatggtcgttttattatgccaagtcctgctaggaggcgcgagccatgctagtttgatacctgagacggggaagaaaaaagtcgccgagattcagggccacgcgggaggacgccgctcagggcagagccatgagctcctgcgggacttcgaggcgacacttctgcagatgtttgggctgcgccgccgcccgcagcctagcaagagtgccgtcattccggactacatgcgggatctttaccggcttcagtctggggaggaggaggaagagcagatccacagcactggtcttgagtatcctgagcgcccggccagccgggccaacaccgtgaggagcttccaccacgaagaacatctggagaacatcccagggaccagtgaaaactctgcttttcgtttcctctttaacctcagcagcatccctgagaacgaggcgatctcctctgcagagcttcggctcttccgggagcaggtggaccagggccctgattgggaaaggggcttccaccgtataaacatttatgaggttatgaagcccccagcagaagtggtgcctgggcacctcatcacacgactactggacacgagactggtccaccacaatgtgacacggtgggaaacttttgatgtgagccctgcggtccttcgctggacccgggagaagcagccaaactatgggctagccattgaggtgactcacctccatcagactcggacccaccagggccagcatgtcaggattagccgatcgttacctcaagggagtgggaattgggcccagctccggcccctcctggtcacctttggccatgatggccggggccatgccttgacccgacgccggagggccaagcgtagccctaagcatcactcacagcgggccaggaagaagaataagaactgccggcgccactcgctctatgtggacttcagcgatgtgggctggaatgactggattgtggccccaccaggctaccaggccttctactgccatggggactgcccctttccactggctgaccacctcaactcaaccaaccatgccattgtgcagaccctggtcaattctgtcaattccagtatccccaaagcctgttgtgtgcccactgaactgagtgccatctccatgctgtacctggatgagtatgataaggtggtactgaaaaattatcaggagatggtagtagagggatgtgggtgccgctgagatcaggcagtccttgaggatagacagatatacacaccacacacacacaccacatacaccacacacacacgttcccatccactcacccacacactacacagactgcttccttatagctggacttttatttaaaaaaaaaaaaaaaaaaatggaaaaaatccctaaacattcaccttgaccttatttatgactttacgtgcaaatgttttgaccatattgatcatatattttgacaaaatatatttataactacgtattaaaagaaaaaaataaaatgagtcattattttaaaggt

SEQ ID NO: 270 - DNA, 3115 bp, Homo sapiens
ccaccatatcggtcccgtatttcacattgataaggtcctgtttcatttctcgtgacattgggtagaatgaggatcctgttttcaatgggtcgctttaccctgggactgacagggaggctctgaccatttagccaccaaatgtaggtgtagttctcactcttaggttcaccccgcggccgatcgtcccccatacctcggccatgcggcccctgctgctactggccctgctgggctggctgctgctggccgaagcgaagggcgacgccaagccggaggacaaccttttagtcctcacggtggccactaaggagaccgagggattccgtcgcttcaagcgctcagctcagttcttcaactacaagatccaggcgcttggcctaggggaggactggaatgtggagaaggggacgtcggcaggtggagggcagaaggtccggctgctgaagaaagctctggagaagcacgcagacaaggaggatctggtcattctcttcacagacagctatgacgtgctgtttgcatcggggccccgggagctcctgaagaagttccggcaggccaggagccaggtggtcttctctgctgaggagctcatctacccagaccgcaggctggagaccaagtatccggtggtgtccgatggcaagaggttcctgggctctggaggcttcatcggttatgcccccaacctcagcaaactggtggccgagtgggagggccaggacagcgacagcgatcagctgttttacaccaagatcttcttggacccggagaagagggagcagatcaatatcaccctggaccaccgctgccgtatcttccagaacctggatggagccttggatgaggtcgtgctcaagtttgaaatgggccatgtgagagcgaggaacctggcctatgacaccctcccggtcctgatccatggcaacgggccaaccaagctgcagttgaactacctgggcaactacatcccgcgcttctggaccttcgaaacaggctgcaccgtgtgtgacgaaggcttgcgcagcctcaagggcattggggatgaagctctgcccacggtcctggtcggcgtgttcatcgaacagcccacgccgtttgtgtccctgttcttccagcggctcctgcggctccactacccccagaaacacatgcgacttttcatccacaaccacgagcagcaccacaaggctcaggtggaagagttcctggcacagcatggcagcgagtaccagtctgtgaagctggtgggccctgaggtgcggatggcgaatgcagatgccaggaacatgggcgcagacctgtgccggcaggaccgcagctgcacctactacttcagcgtggatgctgacgtggccctgaccgagcccaacagcctgcggctgctgatccaacagaacaagaatgtcattgccccgctgatgacccggcatgggaggctgtggtcgaacttctggggggctctcagtgcagatggctactatgcccgttccgaggactacgtggacattgtgcaggggcggcgtgttggtgtctggaatgtgccctatatttcaaacatctacttgatcaagggcagtgccctgcggggtgagctgcagtcctcagatctcttccaccacagcaagctggaccccgacatggccttctgtgccaacatccggcagcaggatgtgttcatgttcctgaccaaccggcacacccttggccatctgctctccctagacagctaccgcaccacccacctgcacaacgacctctgggaggtgttcagcaaccccgaggactggaaggagaagtacatccaccagaactacaccaaagccctggcagggaagctggtggagacgccctgcccggatgtctattggttccccatcttcacggaggtggcctgtgatgagctggtggaggagatggagcactttggccagtggtctctgggcaacaacaaggacaaccgcatccagggtggctacgagaacgtgccgactattgacatccacatgaaccagatcggctttgagcgggagtggcacaaattcctgctggagtacattgcgcccatgacggagaagctctaccccggctactacaccagggcccagtttgacctggcctttgtcgtccgctacaagcctgatgagcagccctcactgatgccacaccatgatgcctccaccttcaccatcaacatcgccctgaaccgagtcggggtggattacgagggcgggggctgtcggttcctgcgctacaactgttccatccgagccccaaggaagggctggaccctcatgcaccctggacgactcacgcattaccatgaggggctccccaccaccaggggcacccgctacatcgcagtctccttcgtcgatccctaattggccaggcctgaccctcttggacctttcttctttgccgacaaccactgcccagcagcctctgggacctcggggtcccagggaacccagtccagcctcctggctgttgacttcccattgctcttggagccaccaatcaaagagattcaaagagattcctgcaggccagaggccggaacacacctttatggctggggctctccgtggtgttctggacccagcccctggagacaccattcacttttactgctttgtagtgactcgtgctctccaacctgtcttcctgaaaaaccaaggcccccttcccccacctcttccatggggtgagacttgagcagaacaggggcttccccaagttgcccagaaagactgtctgggtgagaagccatggccagagcttctcccaggcacaggtgttgcaccagggacttctgcttcaagttttggggtaaagacacctggatcagactccaagggctgccctgagtctgggacttctgcctccatggctggtcatgagagcaaaccgtagtcccctggagacagccactccagagaacctcttgggagacagaagaggcatctgtgcacagctcgatcttctacttgcctgtggggaggggagtgacaggtccacacaccacactgggtcaccctgtcctggatgcctctgaagagagggacagaccgtcagaaactggagagtttctattaaaggtcatttaaaccac

SEQ ID NO: 271 - DNA, 4929 bp, Homo sapiens
  misc_feature (3529)..(3529): N may be C, G, T or A
cctagtatcacactgtgccaccaacgagtctgtggagtccatcaccgccttccagtgccccacctgccggcatgtcatcaccctcagccagcgaggtctagacgggctcaagcgcaacgtcaccctacagaacatcatcgacaggttccagaaagcatcagtgagcgggcccaactctcccagcgagacccgtcgggagcgggcctttgacgccaacaccatgacctccgccgagaaggtcctctgccagttttgtgaccaggatcctgcccaggacgctgtgaagacctgtgtcacttgtgaagtatcctactgtgacgagtgcctgaaagccactcacccgaataagaagccctttacaggccatcgtctgattgagccaattccggactctcacatccgggggctgatgtgcttggagcatgaggatgagaaggtgaatatgtactgtgtgaccgatgaccagttaatctgtgccttgtgtaaactggttgggcggcaccgcgatcatcaggtggcagctttgagtgagcgctatgacaaattgaagcaaaacttagagagtaacctcaccaaccttattaagaggaacacagaactggagacccttttggctaaactcatccaaacctgtcaacatgttgaagtcaatgcatcacgtcaagaagccaaattgacagaggagtgtgatcttctcattgagatcattcagcaaagacgacagattattggaaccaagatcaaagaagggaaggtgatgaggcttcgcaaactggctcagcagattgcaaactgcaaacagtgcattgagcggtcagcatcactcatctcccaagcggaacactctctgaaggagaatgatcatgcgcgtttcctacagactgctaagaatatcaccgagagagtctccatggcaactgcatcctcccaggttctaattcctgaaatcaacctcaatgacacatttgacacctttgccttagatttttcccgagagaagaaactgctagaatgtctggattaccttacagctcccaaccctcccacaattagagaagagctctgcacagcttcatatgacaccatcactgtgcattggacctccgatgatgagttcagcgtggtctcctacgagctccagtacaccatattcaccggacaagccaacgtcgttagtctgtgtaattcggctgatagctggatgatagtacccaacatcaagcagaaccactacacggtgcacggtctgcagagcggcaccaagtacatcttcatggtcaaggccatcaaccaggcgggcagccgcagcagtgagcctgggaagttgaagacaaacagccaaccatttaaactggatcccaaatctgctcatcgaaaactgaaggtgtcccatgataacttgacagtagaacgtgatgagtcatcatccaagaagagtcacacacctgaacgcttcaccagccaggggagctatggagtagctggaaatgtgtttattgatagtggccggcattattgggaagtggtcataagtggaagcacatggtatgccattggtcttgcttacaaatcagccccgaagcatgaatggattgggaagaactctgcttcctgggcgctctgccgctgcaacaataactgggtggtgagacacaatagcaaggaaatccccattgagcctgccccccacctccggcgcgtgggcatcctgctggactatgataacggctctatcgccttttatgatgctttgaactccatccacctctacaccttcgacgtcgcatttgcgcagcctgtttgccccaccttcaccgtgtggaacaagtgtctgacgattatcactgggctccctatcccagaccatttggactgcacagagcagctgccgtgagcgtctggccacatggagctgctttctggggaacagtaaggttcaggccactatttaggggactgagaaagcacaggcttcatgagtgtaatgaaatctcaccagaagtgtcccgaaatcggctcagatagggctcaaaacaagagattcctctccttttactgtgtcttgtattaagtacgggctttaataatttctttaatttttttgtatttagaggaaaatctatagattatttataagagaaacataatcaggattacaacttttaggaattacttggttttgcacattaagaagcccataagtttatcagctatttacaaccttcatttcatcacaatctgtgggcttacaaaaaaacaaaaaacttttgtagttttgtatgttactcatcttcttacctgatatcccatgatgatcccatggtaggtcttctcacctcgatggtgcataacaggatgtgtttgaacctagtaggggaggaaacaggctttcttactctggtttaatttgaagtgttttaattgtgatgtcaaaaagttgtatcagatcaactaaaatggagagcaagacagagaatgaaaagagttgattttggacctcggaccttgccgtggctaaatctttaccttctcatagctgatgggataatgttggaaagaaaggttgtgaatcctttggccacattttgccctgcttctctcagggttaagggttctggaagaacattaagaatgagatgcaattgaaaatagtcattttgaatcctattgattattcaaaaattcaggctgattgtcttttatcagaggtaggattctgttttatagtatagaatctactttatcccttccttttaatagttcctttagacctgtgaaatttcttcactacatttaatagttctcctatttcccgctcccccatatcaattttccttttgtctccggggctgagtaaataaacatgttctgtcacaaatagcagcaccactttggattgattttgctctccaggacatcagcacatggccctgatcagcactaccacatccaaacataagtcactgaaaaacacttaatatttatgagttggtaatgacaagggacattgtataaagtactatttgctagattcatgcctcaaaagttattataaacagacctttattaaacacatcttgaaagatgtagaagtccctctatagtctagtatagtttacaatagagttgtaagaccaaaaaaaaaaaaaaaaaaaattcaaactcgttattcaggaacctgcttataaaatgtcagctgggattctttgcatgccaatctgatgcgttggaatggtccatgaattaaggctttcttgagcagttcttggcccagaactctggcattggttctagtttgatgaagggcatgacctctataaatggtttcaattgctaaaatatttacctgggatactgggtcagccattttgactgagcagactagtggatttagacattgtttttagttattttgtttttaaccaaatcaaccaactgcctccctgaaataagtcaatgaactcattgtttcagcatcacgtggccaaaggtcatgtgattgcaaatctggatttcaagggaggccaanccagcttcctgggtccttccatcctcttccctagcagacactctcctttttcttaacagataggattctatatatttactatattatttatacccagtatgaatattttgatagatacctaagacaatttcacatctaaaagatggacgcctcaatggaaaaaaaacaatctttctctggaaaccttataggtttttctttttattacaatataaaagcaatgtgtgtttgccttctctgagtaaactgaaagggttgtctcagtaatttttacatacattttgggtaactggataatggatattttaatgcactttgtacactaacaggttctaaataaaagggtctaaaactcagcttctgagtttttaaaatcacggtctccaggtaccaataaatgctacagtttgccttatgatgttaacataaaacacttagtagaaggacaatatttccatgaaaataatgtttttcaatattaagaagttactactcaaattttcacagtaagccatttagggtatgtttggctatttttataaggacatgagagattatgtcataattttgttgtggaagtctcactcttggctaacttaaaagcattgtggatagtagcagttactagttccaggttgtcatatttacaggaaaatatgtatatggtgaaaggccaccgtgtttaattactataatgatgtagaaaagattcccgtgtgaatttttttttttgaaagtctaaaaaatgtatgctgtaaaaatttgctgcagtgtaatttgcattctcttaaactgattgaggtcacagtattttattattggggtcctcaccacaggaaacactgcgatacaggggcaaaagagatggcagtgccaattaaattaatacaacaaaatcaatgcagcaccaaccaagactgccaggtctggtgtcatgggtatgcccagagcccaggagttcagaagggccctaagcctgatttaatgctctgctgttgatgtcttgaaattcttaacaatttttgaacaaggggcctgcgttttcacttcgcactgggccttgcaaattacatagcgagtgctcataaaagaactcagaaacgtggtacctctcttcctggtggatacaaataaagaaatctggatccaaagttgaaagttgctggcgatatcattcaagtaggactctaaatagtggattaagatgagggtgggcctgggtgaagattctttccagctttaaaagaaagtgacttcaaaaactgactgcaaatattgacgatggtttctgctggaggaaaagaaacagcttgaatacagacaggcttttttattacggtactgatatattgaccttaaacttgctgaggaactgaactaacgtcctccagtgaccgtgg

SEQ ID NO: 272 - DNA, 1090 bp, Homo sapiens
ggtggtcatggctgcagagcgctctgcatgctggggctggtcctggccttgctgtcctccagctctgctgaggagtacgtgggcctgtctgcaaaccagtgtgccgtgccagccaaggacagggtggactgcggctacccccatgtcacccccaaggagtgcaacaaccggggctgctgctttgactccaggatccctggagtgccttggtgtttcaagcccctgcaggaagcagaatgcaccttctgaggcacctccagctgcccccggccgggggatgcgaggctcggagcacccttgcccggctgtgattgctgccaggcactgttcatctcagcttttctgtcccttttgctcccggcaaagcgcttctgctgaaagttcatatctggagcctgatgtcttaacgaataaaggtcccatgctccagcggcgaagaaaaaggagaatacataaagcacaacgcaacaagaacacaacagagcacgcgaagaggcgcaccggcacaaacaaaataacgatggcggggagcgcgcgcaacagaagaggacatccaccgagtgagcgggggcaagcaatatgttaagggaaagtccacagagcaagtttgagagtcacagagaggggcgccacaagaagacggggcgcacagacacaacaaacgggagaacgacacgaagccgcccggggccgagacaaaacacaagacacgagcgaccgcccggatacagcaaaaacgaaaacgggacgaaggcggggcgacacatcatcgaggcggaagcgagcaagcacaagcaaacacagagtggggcggacgcacgccacagaactcgatcgtgccgaagaaacacagatcgaccacgcacggagacactaacagcgcagacaccacagaaggcgacaaaacaacaaaccaaagacccagcagcaccaacctagcagcgagcgctacgaccacagccagcgcagcaataacaaccgcctacgcgcccgcacggaaacgaaaaagatgacgcacacagacagacacaaatcgaacagaaccgaacataatatcacagagcgggcgcaacgagcaacacgacagcgc

SEQ ID NO: 273 - DNA, 3775 bp, Homo sapiens
cattcataagactcagagctacggccacggcagggacacgcggaaccaagacttggaaacttgattgttgtggttcttcttgggggttatgaaatttcattaatcttttttttttccggggagaaagtttttggaaagattcttccagatatttcttcattttcttttggaggaccgacttactttttttggtcttctttattactcccctccccccgtgggacccgccggacgcgtggaggagaccgtagctgaagctgattctgtacagcgggacagcgctttctgcccctgggggagcaacccctccctcgcccctgggtcctacggagcctgcactttcaagaggtacagcggcatcctgtgggggcctgggcaccgcaggaagactgcacagaaactttgccattgttggaacgggacgttgctccttccccgagcttccccggacagcgtactttgaggactcgctcagctcaccggggactcccacggctcaccccggacttgcaccttacttccccaacccggccatagccttggcttcccggcgacctcagcgtggtcacaggggcccccctgtgcccagggaaatgtttcaggctttccccggagactacgactccggctcccggtgcagctcctcaccctctgccgagtctcaatatctgtcttcggtggactccttcggcagtccacccaccgccgcggcctcccaggagtgcgccggtctcggggaaatgcccggttccttcgtgcccacggtcaccgcgatcacaaccagccaggacctccagtggcttgtgcaacccaccctcatctcttccatggcccagtcccaggggcagccactggcctcccagcccccggtcgtcgacccctacgacatgccgggaaccagctactccacaccaggcatgagtggctacagcagtggcggagcgagtggcagtggtgggccttccaccagcggaactaccagtgggcctgggcctgcccgcccagcccgagcccggcctaggagaccccgagaggagacgctcaccccagaggaagaggagaagcgaagggtgcgccgggaacgaaataaactagcagcagctaaatgcaggaaccggcggagggagctgaccgaccgactccaggcggagacagatcagttggaggaagaaaaagcagagctggagtcggagatcgccgagctccaaaaggagaaggaacgtctggagtttgtgctggtggcccacaaaccgggctgcaagatcccctacgaagaggggcccgggccgggcccgctggcggaggtgagagatttgccgggctcagcaccggctaaggaagatggcttcagctggctgctgccgcccccgccaccaccgcccctgcccttccagaccagccaagacgcaccccccaacctgacggcttctctctttacacacagtgaagttcaagtcctcggcgaccccttccccgttgttaacccttcgtacacttcttcgtttgtcctcacctgcccggaggtctccgcgttcgccggcgcccaacgcaccagcggcagtgaccagccttccgatcccctgaactcgccctccctcctcgctcggtgaactctttagacacacaaaacaaacaaacacatgggggagagagacttggaagaggaggaggaggaggagaaggaggagagagaggggaagagacaaagtgggtgtgtggcctccctggctcctccgtctgaccctctgcggccactgcgccactgccatcggacaggaggattccttgtgttttgtcctgcctcttgtttctgtgccccggcgaggccggagagctggtgactttggggacagggggtgggaaggggatggacacccccagctgactgttggctctctgacgtcaacccaagctctggggatgggtggggaggggggcgggtgacgcccaccttcgggcagtcctgtgtgaggatgaagggacgggggtgggaggtaggctgtggggtgggctggagtcctctccagagaggctcaacaaggaaaaatgccactccctacccaatgtctcccacacccaccctttttttggggtgcccaggttggtttcccctgcactcccgaccttagcttattgatcccacatttccatggtgtgagatcctctttactctgggcagaagtgagcccccccttaaagggaattcgatgcccccctagaataatctcatccccccacccgacttcttttgaaatgtgaacgtccttccttgactgtctagccactccctcccagaaaaactggctctgattggaatttctggcctcctaaggctccccaccccgaaatcagcccccagccttgtttctgatgacagtgttatcccaagaccctgccccctgccagccgaccctcctggccttcctcgttgggccgctctgatttcaggcagcaggggctgctgtgatgccgtcctgctggagtgatttatactgtgaaatgagttggccagattgtggggtgcagctgggtggggcagcacacctctggggggataatgtccccactcccgaaagcctttcctcggtctcccttccgtccatcccccttcttcctcccctcaacagtgagttagactcaagggggtgacagaaccgagaagggggtgacagtcctccatccacgtggcctctctctctctcctcaggaccctcagccctggcctttttctttaaggtcccccgaccaatccccagcctaggacgccaacttctcccaccccttggcccctcacatcctctccaggaaggcagtgaggggctgtgacatttttccggagaagatttcagagctgaggctttggtacccccaaacccccaatatttttggactggcagactcaaggggctggaatctcatgattccatgcccgagtccgcccatccctgaccatggttttggctctcccaccccgccgttccctgcgcttcatctcatgaggatttctttatgaggcaaatttatattttttaatatcggggggtggaccacgccgccctccatccgtgctgcatgaaaaacattccacgtgccccttgtcgcgcgtctcccatcctgatcccagacccattccttagctatttatccctttcctggtttccgaaaggcaattatatctattatgtataagtaaatatattatatatggatgtgtgtgtgtgcgtgcgcgtgagtgtgtgagcgcttctgcagcctcggcctaggtcacgttggccctcaaagcgagccgttgaattggaaactgcttctagaaactctggctcagcctgtctcgggctgacccttttctgatcgtctcggcccctctgattgttcccgatggtctctctccctctgtcttttctcctccgcctgtgtccatctgaccgttttcacttgtctcctttctgactgtccctgccaatgctccagctgtcgtctgactctgggttcgttggggacatgagattttattttttgtgagtgagactgagggatcgtagatttttacaatctgtatctttgacaattctgggtgcgagtgtgagagtgtgagcagggcttgctcctgccaaccacaattcaatgaatccccgacccccctaccccatgctgtacttgtggttctctttttgtattttgcatctgaccccggggggctgggacagattggcaatgggccgtcccctctccccttggttctgcactgttgccaataaaaagctcttaaaaacgc

SEQ ID NO: 274 - DNA, 5869 bp, Homo sapiens
aaacgccgcccaggacgcagccgccgccgccgccgctcctctgccactggctctgcgccccagcccggctctgctgcagcggcagggaggaagagccgccgcagcgcgactcgggagccccgggccacagcctggcctccggagccacccacaggcctccccgggcggcgcccacgctcctaccgcccggacgcgcggatcctccgccggcaccgcagccacctgctcccggcccagaggcgacgacacgatgcgctgcgcgctggcgctctcggcgctgctgctactgttgtcaacgccgccgctgctgccgtcgtcgccgtcgccgtcgccgtcgccgtcgccctcccagaatgcaacccagactactacggactcatctaacaaaacagcaccgactccagcatccagtgtcaccatcatggctacagatacagcccagcagagcacagtccccacttccaaggccaacgaaatcttggcctcggtcaaggcgaccacccttggtgtatccagtgactcaccggggactacaaccctggctcagcaagtctcaggcccagtcaacactaccgtggctagaggaggcggctcaggcaaccctactaccaccatcgagagccccaagagcacaaaaagtgcagacaccactacagttgcaacctccacagccacagctaaacctaacaccacaagcagccagaatggagcagaagatacaacaaactctggggggaaaagcagccacagtgtgaccacagacctcacatccactaaggcagaacatctgacgacccctcaccctacaagtccacttagcccccgacaacccactttgacgcatcctgtggccaccccaacaagctcgggacatgaccatcttatgaaaatttcaagcagttcaagcactgtggctatccctggctacaccttcacaagcccggggatgaccaccaccctaccgtcatcggttatctcgcaaagaactcaacagacctccagtcagatgccagccagctctacggccccttcctcccaggagacagtgcagcccacgagcccggcaacggcattgagaacacctaccctgccagagaccatgagctccagccccacagcagcatcaactacccaccgataccccaaaacaccttctcccactgtggctcatgagagtaactgggcaaagtgtgaggatcttgagacacagacacagagtgagaagcagctcgtcctgaacctcacaggaaacaccctctgtgcagggggcgcttcggatgagaaattgatctcactgatatgccgagcagtcaaagccaccttcaacccggcccaagataagtgcggcatacggctggcatctgttccaggaagtcagaccgtggtcgtcaaagaaatcactattcacactaagctccctgccaaggatgtgtacgagcggctgaaggacaaatgggatgaactaaaggaggcaggggtcagtgacatgaagctaggggaccaggggccaccggaggaggccgaggaccgcttcagcatgcccctcatcatcaccatcgtctgcatggcgtcattcctgctcctcgtggcggccctctatggctgctgccaccagcgcctctcccagaggaaggaccagcagcggctaacagaggagctgcagacagtggagaatggttaccatgacaacccaacactggaagtgatggagacctcttctgagatgcaggagaagaaggtggtcagcctcaacggggagctgggggacagctggatcgtccctctggacaacctgaccaaggacgacctggatgaggaggaagacacacacctctagtccggtctgccggtggcctccagcagcaccacagagctccagaccaaccaccccaagtgccgtttggatggggaagggaaagactggggagggagagtgaactccgaggggtgtcccctcccaatccccccagggccttaatttttcccttttcaacctgaacaaatcacattctgtccagattcctcttgtaaaataacccactagtgcctgagctcagtgctgctggatgatgagggagatcaagaaaaagccacgtaagggactttatagatgaactagtggaatcccttcattctgcagtgagattgccgagacctgaagagggtaagtgacttgcccaaggtcagagccacttggtgacagagccaggatgagaacaaagattccatttgcaccatgccacactgctgtgttcacatgtgccttccgtccagagcagtcccgggcaggggtgaaactccagcaggtggctgggctggaaaggagggcagggctacatcctggctcggtgggatctgacgacctgaaagtccagctcccaagttttccttctcctaccccagcctcgtgtacccatcttcccaccctctatgttcttacccctccctacactcagtgtttgttcccacttactctgtcctggggcctctgggattagcacaggttattcataaccttgaaccccttgttctggattcggattttctcacatttgcttcgtgagatgggggcttaacccacacaggtctccgtgcgtgaaccaggtctgcttaggggacctgcgtgcaggtgaggagagaaggggacactcgagtccaggctggtatctcagggcagctgatgaggggtcagcaggaacactggcccattgcccctggcactccttgcagaggccacccacgatcttctttgggcttccatttccaccagggactaaaatctgctgtagctagtgagagcagcgtgttccttttgttgttcactgctcagctgatgggagtgattccctgagacccagtatgaaagagcagtggctgcaggagaggccttcccggggccccccatcagcgatgtgtcttcagagacaatccattaaagcagccaggaaggacaggctttcccctgtatatcataggaaactcagggacatttcaagttgctgagagttttgttatagttgttttctaacccagccctccactgccaaaggccaaaagctcagacagttggcagacgtccagttagctcatctcactcactctgattctcctgtgccacaggaaaagagggcctggaaagcgcagtgcatgctgggtgcatgaagggcagcctgggggacagactgttgtgggaacgtcccactgtcctggcctggagctaggccttgctgttcctcttctctgtgagcctagtggggctgctgcggttctcttgcagtttctggtggcatctcaggggaacacaaaagctatgtctattccccaatataggacttttatgggctcggcagttagctgccatgtagaaggctcctaagcagtgggcatggtgaggtttcatctgattgagaagggggaatcctgtgtggaatgttgaactttcgccatggtctccatcgttctgggcgtaaattccctgggatcaagtaggaaaatgggcagaactgcttaggggaatgaaattgccatttttcgggtgaaacgccacacctccagggtcttaagagtcaggctccggctgtagtagctctgatgaaataggctatccactcgggatggcttactttttaaaagggtagggggaggggctggggaagatctgtcctgcaccatctgcctaattccttcctcacagtctgtagccatctgatatcctagggggaaaaggaaggccaggggttcacatagggccccagcgagtttcccaggagttagagggatgcgaggctaacaagttccaaaaacatctgccccgatgctctagtgtttggaggtgggcaggatggagaacagtgcctgtttgggggaaaacaggaaatcttgttaggcttgagtgaggtgtttgcttccttcttgcccagcgctgggttctctccacccagtaggttttctgttgtggtcccgtgggagaggccagactggattattcctcctttgctgatcctgggtcacacttcaccagccagggcttttgacggagacagcaaataggcctctgcaaatcaatcaaaggctgcaaccctatggcctcttggagacagatgatgactggcaaggactagagagcaggagtgcctggccaggtcggtcctgactctcctgactctccatcgctctgtccaaggagaacccggagaggctctgggctgattcagaggttactgctttatattcgtccaaactgtgttagtctaggcttaggacagcttcagaatctgacaccttgccttgctcttgccaccaggacacctatgtcaacaggccaaacagccatgcatctataaaggtcatcatcttctgccacctttactgggttctaaatgctctctgataattcagagagcattgggtctgggaagaggtaagaggaacactagaagctcagcatgacttaaacaggttgtagcaaagacagtttatcatcaactctttcagtggtaaactgtggtttccccaagctgcacaggaggccagaaaccacaagtatgatgactaggaagcctactgtcatgagagtggggagacaggcagcaaagcttatgaaggaggtacagaatattctttgcgttgtaagacagaatacgggtttaatctagtctaggcrccagatttttttcccgcttgataaggaaagctagcagaaagtttatttaaaccacttcttgagctttatcttttttgacaatatactggagaaactttgaagaacaagttcaaactgatacatatacacatatttttttgataatgtaaatacagtgaccatgttaacctaccctgcactgctttaagtgaacatactttgaaaaagcattatgttagctgagtgatggccaagttttttctctggacaggaatgtaaatgtcttactggaaatgacaagtttttgcttgatttttttttttaaacaaaaaatgaaatataacaagacaaacttatgataaagtatttgtcttgtagatcaggtgttttgttttgtttttttaattttaaaatgcaaccctgccccctccccagcaaagtcacagctccatttcagtaaaggttggagtcaatatgctctggttggcaggcaaccctgtagtcatggagaaaggtatttcaagatctagtccaatctttttctagagaaaaagataatctgaagctcacaaagatgaagtgacttcctcaaaatcacatggttcaggacagaaacaagattaaaacctggatccacagactgtgcgcctcagaaggaataatcggtaaattaagaattgctactcgaaggtgccagaatgacacaaaggacagaattcctttcccagttgttaccctagcaaggctagggagggcatgaacacaaacataagaactggtcttctcacactttctctgaatcatttaggtttaagatgtaagtgaacaattctttctttctgccaagaaacaaagttttggatgagcttttatatatggaacttactccaacaggactgagggaccaaggaaacatgatgggggaggcaagagagggcaaagagtaaaactgtagcatagcttttgtcacggtcactagctgatccctcaggtctgctgcaaacacagcatggaggacacagatgactctttggtgttggtctttttgtctgcagtgaatgttcaacagtttgcccaggaactgggggatcatatatgtcttagtggacaggggtctgaagtacactggaatttactgagaaacttgtttgtaaaaactatagttaataattattgcattttcttacaaaaatatattttggaaaattgtatactgtcaattaaagt

SEQ ID NO: 275 - DNA, 5611 bp, Homo sapiens
gcgcgaccgtcccgggggtggggccgggcgcagcggcgagaggaggcgaaggtggctgcggtagcagcagcgcggcagcctcggacccagcccggagcgcagggcggccgctgcaggtccccgctcccctccccgtgcgtccgcccatggccgccgccgggcagctgtgcttgctctacctgtcggcggggctcctgtcccggctcggcgcagccttcaacttggacactcgggaggacaacgtgatccggaaatatggagaccccgggagcctcttcggcttctcgctggccatgcactggcaactgcagcccgaggacaagcggctgttgctcgtgggggccccgcgcggagaagcgcttccactgcagagagccaacagaacgggagggctgtacagctgcgacatcaccgcccgggggccatgcacgcggatcgagtttgataacgatgctgaccccacgtcagaaagcaaggaagatcagtggatgggggtcaccgtccagagccaaggtccagggggcaaggtcgtgacatgtgctcaccgatatgaaaaaaggcagcatgttaatacgaagcaggaatcccgagacatctttgggcggtgttatgtcctgagtcagaatctcaggattgaagacgatatggatgggggagattggagcttttgtgatgggcgattgagaggccatgagaaatttggctcttgccagcaaggtgtagcagctacttttactaaagactttcattacattgtatttggagccccgggtacttataactggaaagggattgttcgtgtagagcaaaagaataacactttttttgacatgaacatctttgaagatgggccttatgaagttggtggagagactgagcatgatgaaagtctcgttcctgttcctgctaacagttacttaggtttttctttggactcagggaaaggtattgtttctaaagatgagatcacttttgtatctggtgctcccagagccaatcacagtggagccgtggttttgctgaagagagacatgaagtctgcacatctcctccctgagcacatattcgatggagaaggtctggcctcttcatttggctatgatgtggcggtggtggacctcaacaaggatgggtggcaagatatagttattggagccccacagtattttgatagagatggagaagttggaggtgcagtgtatgtctacatgaaccagcaaggcagatggaataatgtgaagccaattcgtcttaatggaaccaaagattctatgtttggcattgcagtaaaaaatattggagatattaatcaagatggctacccagatattgcagttggagctccgtatgatgacttgggaaaggtttttatctatcatggatctgcaaatggaataaataccaaaccaacacaggttctcaagggtatatcaccttattttggatattcaattgctggaaacatggaccttgatcgaaattcctaccctgatgttgctgttggttccctctcagattcagtaactattttcagatcccggcctgtgattaatattcagaaaaccatcacagtaactcctaacagaattgacctccgccagaaaacagcgtgtggggcgcctagtgggatatgcctccaggttaaatcctgttttgaatatactgctaaccccgctggttataatccttcaatatcaattgtgggcacacttgaagctgaaaaagaaagaagaaaatctgggctatcctcaagagttcagtttcgaaaccaaggttctgagcccaaatatactcaagaactaactctgaagaggcagaaacagaaagtgtgcatggaggaaaccctgtggctacaggataatatcagagataaactgcgtcccattcccataactgcctcagtggagatccaagagccaagctctcgtaggcgagtgaattcacttccagaagttcttccaattctgaattcagatgaacccaagacagctcatattgatgttcacttcttaaaagagggatgtggagacgacaatgtatgtaacagcaaccttaaactagaatataaattttgcacccgagaaggaaatcaagacaaattttcttatttaccaattcaaaaaggtgtaccagaactagttctaaaagatcagaaggatattgctttagaaataacagtgacaaacagcccttccaacccaaggaatcccacaaaagatggcgatgacgcccatgaggctaaactgattgcaacgtttccagacactttaacctattctgcatatagagaactgagggctttccctgagaaacagttgagttgtgttgccaaccagaatggctcgcaagctgactgtgagctcggaaatccttttaaaagaaattcaaatgtcactttttatttggttttaagtacaactgaagtcacctttgacaccccatatctggatattaatctgaagttagaaacaacaagcaatcaagataatttggctccaattacagctaaagcaaaagtggttattgaactgcttttatcggtctcgggagttgctaaaccttcccaggtgtattttggaggtacagttgttggcgagcaagctatgaaatctgaagatgaagtgggaagtttaatagagtatgaattcagggtaataaacttaggtaaacctcttacaaacctcggcacagcaaccttgaacattcagtggccaaaagaaattagcaatgggaaatggttgctttatttggtgaaagtagaatccaaaggattggaaaaggtaacttgtgagccacaaaaggagataaactccctgaacctaacggagtctcacaactcaagaaagaaacgggaaattactgaaaaacagatagatgataacagaaaattttctttatttgctgaaagaaaataccagactcttaactgtagcgtgaacgtgaactgtgtgaacatcagatgcccgctgcgggggctggacagcaaggcgtctcttattttgcgctcgaggttatggaacagcacatttctagaggaatattccaaactgaactacttggacattctcatgcgagccttcattgatgtgactgctgctgccgaaaatatcaggctgccaaatgcaggcactcaggttcgagtgactgtgtttccctcaaagactgtagctcagtattcgggagtaccttggtggatcatcctagtggctattctcgctgggatcttgatgcttgctttattagtgtttatactatggaagtgtggtttcttcaagagaaataagaaagatcattatgatgccacatatcacaaggctgagatccatgctcagccatctgataaagagaggcttacttctgatgcatagtattgatctacttctgtaattgtgtggattctttaaacgctctaggtacgatgacagtgttccccgataccatgctgtaaggatccggaaagaagagcgagagatcaaagatgaaaagtatattgataaccttgaaaaaaaacagtggatcacaaagtggaacagaaatgaaagctactcatagcgggggcctaaaaaaaaaaaagcttcacagtacccaaactgctttttccaactcagaaattcaatttggatttaaaagcctgctcaatccctgaggactgatttcagagtgactacacacagtacgaacctacagttttaactgtggatattgttacgtagcctaaggctcctgttttgcacagccaaatttaaaactgttggaatggatttttctttaactgccgtaatttaactttctgggttgcctttgtttttggcgtggctgacttacatcatgtgttggggaagggcctgcccagttgcactcaggtgacatcctccagatagtgtagctgaggaggcacctacactcacctgcactaacagagtggccgtcctaacctcgggcctgctgcgcagacgtccatcacgttagctgtcccacatcacaagactatgccattggggtagttgtgtttcaacggaaagtgctgtcttaaactaaatgtgcaatagaaggtgatgttgccatcctaccgtcttttcctgtttcctagctgtgtgaatacctgctcacgtcaaatgcatacaagtttcattctccctttcactaaaaacacacaggtgcaacagacttgaatgctagttatacttatttgtatatggtatttattttttcttttctttacaaaccattttgttattgactaacaggccaaagagtctccagtttacccttcaggttggtttaatcaatcagaattagaattagagcatgggagggtcatcactatgacctaaattatttactgcaaaaagaaaatctttataaatgtaccagagagagttgttttaataacttatctataaactataacctctccttcatgacagcctccaccccacaacccaaaaggtttaagaaatagaattataactgtaaagatgtttatttcaggcattggatattttttactttagaagcctgcataatgtttctggatttacatactgtaacattcaggaattcttggagaagatgggtttattcactgaactctagtgcggtttactcactgctgcaaatactgtatattcaggacttgaaagaaatggtgaatgcctatggaactagtggatccaaactgatccagtataagactactgaatctgctaccaaaacagttaatcagtgagtcgagtgttctattttttgttttgtttcctcccctatctgtattcccaaaaattactttggggctaatttaacaagaactttaaattgtgttttaattgtaaaaatggcagggggtggaattattactctatacattcaacagagactgaatagatatgaaagctgattttttttaattaccatgcttcacaatgttaagttatatggggagcaacagcaaacaggtgctaatttgttttggatatagtataagcagtgtctgtgttttgaaagaatagaacacagtttgtagtgccactgttgttttggggggggctttttttctttttccggaaaatccttaaaccttaagatactaaggacgttgttttggttgtacttggaattcttagtcacaaaatatattttgtttacaaaaatttctgtaaaacaggttataacagtgtttaaagtctcagtttcttgcttggggaacttgtgtccctaatgtgttagattgctagattgctaaggagctgatacttgacagttttttagacctgtgttactaaaaaaaagatgaatgtcggaaaagggtgttgggagggtggtcaacaaagaaacaaagatgttatggtgtttagacttatggttgttaaaaatgtcatctcaagtcaagtcactggtctgtttgcatttgatacatttttgtactaactagcattgtaaaattatttcatgattagaaattacctgtggatatttgtataaaagtgtgaaataaattttttataaaagtgttcattgtttcgtaacacagcattgtatatgtgaagcaaactctaaaattataaatgacaacctgaattatctatttcatcaaaaaaaaaaaaaaaaaaaa

SEQ ID NO: 276 - DNA, 1946 bp, Homo sapiens
ggcacgaggagaggatcctgggcgccgccaggttctgtggacaatcacaatgggaatccaaggagggtctgtcctgttcgggctgctgctcgtcctggctgtcttctgccattcaggtcatagcctgcagtgctacaactgtcctaacccaactgctgactgcaaaacagccgtcaattgttcatctgattttgatgcgtgtctcattaccaaagctgggttacaagtgtataacaagtgttggaagtttgagcattgcaatttcaacgacgtcacaacccgcttgagggaaaatgagctaacgtactactgctgcaagaaggacctgtgtaactttaacgaacagcttgaaaatggtgggacatccttatcagagaaaacagttcttctgctggtgactccatttctggcagcagcctggagccttcatccctaagtcaacaccaggagagcttctcccaaactccccgttcctgcgtagtccgctttctcttgctgccacattctaaaggcttgatattttccaaatggatcctgttgggaaagaataaaattagcttgagcaacctggctaagatagaggggctctgggagactttgaagaccagtcctgtttgcagggaagccccacttgaaggaagaagtctaagagtgaagtaggtgtgacttgaactagattgcatgcttcctcctttgctcttgggaagaccagctttgcagtgacagcttgagtgggttctctgcagccctcagattatttttcctctggctccttggatgtagtcagttagcatcattagtacatctttggagggtggggcaggagtatatgagcatcctctctcacatggaacgctttcataaacttcagggatcccgtgttgccatggaggcatgccaaatgttccatatgtgggtgtcagtcagggacaacaagatccttaatgcagagctagaggacttctggcagggaagtggggaagtgttccagatagcagggcatgaaaacttagagaggtacaagtggctgaaaatcgagtttttcctctgtctttaaattttatatgggctttgttatcttccactggaaaagtgtaatagcatacatcaatggtgtgttaaagctatttccttgccttttttttattggaatggtaggatatcttggctttgccacacacagttacagagtgaacactctactacatgtgactggcagtattaagtgtgcttattttaaatgttactggtagaaaggcagttcaggtatgtgtgtatatagtatgaatgcagtggggacaccctttgtggttacagtttgagacttccaaaggtcatccttaataacaacagatctgcaggggtatgttttaccatctgcatccagcctcctgctaactcctagctgactcagcatagattgtataaaatacctttgtaacggctcttagcacactcacagatgtttgaggctttcagaagctcttctaaaaaatgatacacacctttcacaagggcaaactttttccttttccctgtgtattctagtgaatgaatctcaagattcagtagacctaatgacatttgtattttatgatcttggctgtatttaatggcataggctgacttttgcagatggaggaatttcttgattaatgttgaaaaaaaacccttgattatactctgttggacaaaccgagtgcaatgaatgatgcttttctgaaaatgaaatataacaagtgggtgaatgtggttatggccgaaaaggatatgcagtatgcttaatggtagcaactgaaagaagacatcctgagcagtgccagctttcttctgttgatgccgttccctgaacataggaaaatagaaacttgcttatcaaaacttaaaaaaaaaaaaaaaaaaaaaaaaaaaaaaaaaaaaaaaaaaaaaaaaaaaaaaaaaaaaaa

SEQ ID NO: 277 - DNA, 5060 bp, Homo sapiens
acgcagagcgctgctgggctgccgggtctcccgcttcctcctcctgctccaagggcctcctgcatgagggcgcggtagagacccggacccgcgccgtgctcctgccgtttcgctgcgctccgcccgggcccggctcagccaggccccgcggtgagccatgattcgcctcggggctccccagtcgctggtgctgctgacgctgctcgtcgccgctgtccttcggtgtcagggccaggatgtccaggaggctggcagctgtgtgcaggatgggcagaggtataatgataaggatgtgtggaagccggagccctgccggatctgtgtctgtgacactgggactgtcctctgcgacgacataatctgtgaagacgtgaaagactgcctcagccctgagatccccttcggagagtgctgccccatctgcccaactgacctcgccactgccagtgggcaaccaggaccaaagggacagaaaggagaacctggagacatcaaggatattgtaggacccaaaggacctcctgggcctcagggacctgcaggggaacaaggacccagaggggatcgtggtgacaaaggtgaaaaaggtgcccctggacctcgtggcagagatggagaacctgggacccctggaaatcctggcccccctggtcctcccggcccccctggtccccctggtcttggtggaaactttgctgcccagatggctggaggatttgatgaaaaggctggtggcgcccagttgggagtaatgcaaggaccaatgggccccatgggacctcgaggacctccaggccctgcaggtgctcctgggcctcaaggatttcaaggcaatcctggtgaacctggtgaacctggtgtctctggtcccatgggtccccgtggtcctcctggtccccctggaaagcctggtgatgatggtgaagctggaaaacctggaaaagctggtgaaaggggtccgcctggtcctcagggtgctcgtggtttcccaggaaccccaggccttcctggtgtcaaaggtcacagaggttatccaggcctggacggtgctaagggagaggcgggtgctcctggtgtgaagggtgagagtggttccccgggtgagaacggatctccgggcccaatgggtcctcgtggcctgcctggtgaaagaggacggactggccctgctggcgctgcgggtgcccgaggcaacgatggtcagccaggccccgcaggtcctccgggtcctgtcggtcctgctggtggtcctggcttccctggtgctcctggagccaagggtgaagccggccccactggtgcccgtggtcctgaaggtgctcaaggtcctcgcggtgaacctggtactcctgggtcccctgggcctgctggtgcctccggtaaccctggaacagatggaattcctggagccaaaggatctgctggtgctcctggcattgctggtgctcctggcttccctgggccacggggtcctcctggccctcaaggtgcaactggtcctctgggcccgaaaggtcagacgggtgaacctggtattgctggcttcaaaggtgaacaaggccccaagggagaacctggccctgctggcccccagggagcccctggacccgctggtgaagaaggcaagagaggtgcccgtggagagcctggtggcgttgggcccatcggtccccctggagaaagaggtgctcccggaaaccgcggtttcccaggtcaagatggtctggcaggtcccaagggagcccctggagagcgagggcccagtggtcttgctggccccaagggagccaacggtgaccctggccgtcctggagaacctggccttcctggagcccggggtctcactggccgccctggtgatgctggtcctcaaggcaaagttggcccttctggagcccctggtgaagatggtcgtcctggacctccaggtcctcagggggctcgtgggcagcctggtgtcatgggtttccctggccccaaaggtgccaacggtgagcctggcaaagctggtgagaagggactgcctggtgctcctggtctgaggggtcttcctggcaaagatggtgagacaggtgctgcaggaccccctggccctgctggacctgctggtgaacgaggcgagcagggtgctcctgggccatctgggttccagggacttcctggccctcctggtcccccaggtgaaggtggaaaaccaggtgaccagggtgttcccggtgaagctggagcccctggcctcgtgggtcccaggggtgaacgaggtttcccaggtgaacgtggctctcccggtgcccagggcctccagggtccccgtggcctccccggcactcctggcactgatggtcccaaaggtgcatctggcccagcaggcccccctggcgcacagggccctccaggtcttcagggaatgcctggcgagaggggagcagctggtatcgctgggcccaaaggcgacaggggtgacgttggtgagaaaggccctgagggagcccctggaaaggatggtggacgaggcctgacaggtcccattggcccccctggcccagctggtgctaacggcgagaagggagaagttggacctcctggtcctgcaggaagtgctggtgctcgtggcgctccgggtgaacgtggagagactggcccccccggaccagcgggatttgctgggcctcctggtgctgatggccagcctggggccaagggtgagcaaggagaggccggccagaaaggcgatgctggtgcccctggtcctcagggcccctctggagcacctgggcctcagggtcctactggagtgactggtcctaaaggagcccgaggtgcccaaggccccccgggagccactggattccctggagctgctggccgcgttggacccccaggctccaatggcaaccctggaccccctggtccccctggtccttctggaaaagatggtcccaaaggtgctcgaggagacagcggcccccctggccgagctggtgaacccggcctccaaggtcctgctggaccccctggcgagaagggagagcctggagatgacggtccctctggtgccgaaggtccaccaggtccccagggtctggctggtcagagaggcatcgtcggtctgcctgggcaacgtggtgagagaggattccctggcttgcctggcccatcgggtgagcccggcaagcagggtgctcctggagcatctggagacagaggtcctcctggccccgtgggtcctcctggcctgacgggtcctgcaggtgaacccggacgagagggaagccccggtgctgatggcccccctggcagagatggcgctgctggagtcaagggtgatcgtggtgagactggtgctgtgggagctcctggagcccctgggccccctggctcccctggccccgctggtccaactggcaagcaaggagacagaggagaagctggtgcacaaggccccatgggaccctcaggaccagctggagcccggggaatccagggtcctcaaggccccagaggtgacaaaggagaggctggagagcctggcgagagaggcctgaagggacaccgtggcttcactggtctgcagggtctgcccggccctcctggtccttctggagaccaaggtgcttctggtcctgctggtccttctggccctagaggtcctcctggccccgtcggtccctctggcaaagatggtgctaatggaatccctggccccattgggcctcctggtccccgtggacgatcaggcgaaaccggtcctgctggtcctcctggaaatcctgggccccctggtcctccaggtccccctggccctggcatcgacatgtccgcctttgctggcttaggcccgagagagaagggccccgaccccctgcagtacatgcgggccgaccaggcagccggtggcctgagacagcatgacgccgaggtggatgccacactcaagtccctcaacaaccagattgagagcatccgcagccccgagggctcccgcaagaaccctgctcgcacctgcagagacctgaaactctgccaccctgagtggaagagtggagactactggattgaccccaaccaaggctgcaccttggacgccatgaaggttttctgcaacatggagactggcgagacttgcgtctaccccaatccagcaaacgttcccaagaagaactggtggagcagcaagagcaaggagaagaaacacatctggtttggagaaaccatcaatggtggcttccatttcagctatggagatgacaatctggctcccaacactgccaacgtccagatgaccttcctacgcctgctgtccacggaaggctcccagaacatcacctaccactgcaagaacagcattgcctatctggacgaagcagctggcaacctcaagaaggccctgctcatccagggctccaatgacgtggagatccgggcagagggcaatagcaggttcacgtacactgccctgaaggatggctgcacgaaacataccggtaagtggggcaagactgttatcgagtaccggtcacagaagacctcacgcctccccatcattgacattgcacccatggacataggagggcccgagcaggaattcggtgtggacatagggccggtctgcttcttgtaaaaacctgaacccagaaacaacacaatccgttgcaaacccaaaggacccaagtactttccaatctcagtcactctaggactctgcactgaatggctgacctgacctgatgtccattcatcccaccctctcacagttcggacttttctcccctctctttctaagagacctgaactgggcagactgcaaaataaaatctcggtgttctatttatttattgtcttcctgtaagaccttcgggtcaaggcagaggcaggaaactaactggtgtgagtcaaatgccccctgagtgactgcccccagcccaggccagaagacctcccttcaggtgccgggcgcaggaactgtgtgtgtcctacacaatggtgctattctgtgtcaaacacctctgtattttttaaaacatcaattgatattaaaaatgaaaagattattggaaagt

SEQ ID NO: 278 - DNA, 5084 bp, Homo sapiens
agcaccacggcagcaggaggtttcggctaagttggaggtactggccacgactgcatgcccgcgcccgccaggtgatacctccgccggtgacccaggggctctgcgacacaaggagtctgcatgtctaagtgctagacatgctcagctttgtggatacgcggactttgttgctgcttgcagtaaccttatgcctagcaacatgccaatctttacaagaggaaactgtaagaaagggcccagccggagatagaggaccacgtggagaaaggggtccaccaggccccccaggcagagatggtgaagatggtcccacaggccctcctggtccacctggtcctcctggcccccctggtctcggtgggaactttgctgctcagtatgatggaaaaggagttggacttggccctggaccaatgggcttaatgggacctagaggcccacctggtgcagctggagccccaggccctcaaggtttccaaggacctgctggtgagcctggtgaacctggtcaaactggtcctgcaggtgctcgtggtccagctggccctcctggcaaggctggtgaagatggtcaccctggaaaacccggacgacctggtgagagaggagttgttggaccacagggtgctcgtggtttccctggaactcctggacttcctggcttcaaaggcattaggggacacaatggtctggatggattgaagggacagcccggtgctcctggtgtgaagggtgaacctggtgcccctggtgaaaatggaactccaggtcaaacaggagcccgtgggcttcctggtgagagaggacgtgttggtgcccctggcccagctggtgcccgtggcagtgatggaagtgtgggtcccgtgggtcctgctggtcccattgggtctgctggccctccaggcttcccaggtgcccctggccccaagggtgaaattggagctgttggtaacgctggtcctgctggtcccgccggtccccgtggtgaagtgggtcttccaggcctctccggccccgttggacctcctggtaatcctggagcaaacggccttactggtgccaagggtgctgctggccttcccggcgttgctggggctcccggcctccctggaccccgcggtattcctggccctgttggtgctgccggtgctactggtgccagaggacttgttggtgagcctggtccagctggctccaaaggagagagcggtaacaagggtgagcccggctctgctgggccccaaggtcctcctggtcccagtggtgaagaaggaaagagaggccctaatggggaagctggatctgccggccctccaggacctcctgggctgagaggtagtcctggttctcgtggtcttcctggagctgatggcagagctggcgtcatgggccctcctggtagtcgtggtgcaagtggccctgctggagtccgaggacctaatggagatgctggtcgccctggggagcctggtctcatgggacccagaggtcttcctggttcccctggaaatatcggccccgctggaaaagaaggtcctgtcggcctccctggcatcgacggcaggcctggcccaattggcccagctggagcaagaggagagcctggcaacattggattccctggacccaaaggccccactggtgatcctggcaaaaacggtgataaaggtcatgctggtcttgctggtgctcggggtgctccaggtcctgatggaaacaatggtgctcagggacctcctggaccacagggtgttcaaggtggaaaaggtgaacagggtcccgctggtcctccaggcttccagggtctgcctggcccctcaggtcccgctggtgaagttggcaaaccaggagaaaggggtctccatggtgagtttggtctccctggtcctgctggtccaagaggggaacgcggtcccccaggtgagagtggtgctgccggtcctactggtcctattggaagccgaggtccttctggacccccagggcctgatggaaacaagggtgaacctggtgtggttggtgctgtgggcactgctggtccatctggtcctagtggactcccaggagagaggggtgctgctggcatacctggaggcaagggagaaaagggtgaacctggtctcagaggtgaaattggtaaccctggcagagatggtgctcgtggtgctcatggtgctgtaggtgcccctggtcctgctggagccacaggtgaccggggcgaagctggggctgctggtcctgctggtcctgctggtcctcggggaagccctggtgaacgtggcgaggtcggtcctgctggccccaacggatttgctggtccggctggtgctgctggtcaaccgggtgctaaaggagaaagaggagccaaagggcctaagggtgaaaacggtgttgttggtcccacaggccccgttggagctgctggcccagctggtccaaatggtccccccggtcctgctggaagtcgtggtgatggaggcccccctggtatgactggtttccctggtgctgctggacggactggtcccccaggaccctctggtatttctggccctcctggtccccctggtcctgctgggaaagaagggcttcgtggtcctcgtggtgaccaaggtccagttggccgaactggagaagtaggtgcagttggtccccctggcttcgctggtgagaagggtccctctggagaggctggtactgctggacctcctggcactccaggtcctcagggtcttcttggtgctcctggtattctgggtctccctggctcgagaggtgaacgtggtctacctggtgttgctggtgctgtgggtgaacctggtcctcttggcattgccggccctcctggggcccgtggtcctcctggtgctgtgggtagtcctggagtcaacggtgctcctggtgaagctggtcgtgatggcaaccctgggaacgatggtcccccaggtcgcgatggtcaacccggacacaagggagagcgcggttaccctggcaatattggtcccgttggtgctgcaggtgcacctggtcctcatggccccgtgggtcctgctggcaaacatggaaaccgtggtgaaactggtccttctggtcctgttggtcctgctggtgctgttggcccaagaggtcctagtggcccacaaggcattcgtggcgataagggagagcccggtgaaaaggggcccagaggtcttcctggcttaaagggacacaatggattgcaaggtctgcctggtatcgctggtcaccatggtgatcaaggtgctcctggctccgtgggtcctgctggtcctaggggccctgctggtccttctggccctgctggaaaagatggtcgcactggacatcctggtacggttggacctgctggcattcgaggccctcagggtcaccaaggccctgctggcccccctggtccccctggccctcctggacctccaggtgtaagcggtggtggttatgactttggttacgatggagacttctacagggctgaccagcctcgctcagcaccttctctcagacccaaggactatgaagttgatgctactctgaagtctctcaacaaccagattgagacccttcttactcctgaaggctctagaaagaacccagctcgcacatgccgtgacttgagactcagccacccagagtggagcagtggttactactggattgaccctaaccaaggatgcactatggatgctatcaaagtatactgtgatttctctactggcgaaacctgtatccgggcccaacctgaaaacatcccagccaagaactggtataggagctccaaggacaagaaacacgtctggctaggagaaactatcaatgctggcagccagtttgaatataatgtagaaggagtgacttccaaggaaatggctacccaacttgccttcatgcgcctgctggccaactatgcctctcagaacatcacctaccactgcaagaacagcattgcatacatggatgaggagactggcaacctgaaaaaggctgtcattctacagggctctaatgatgttgaacttgttgctgagggcaacagcaggttcacttacactgttcttgtagatggctgctctaaaaagacaaatgaatggggaaagacaatcattgaatacaaaacaaataagccatcacgcctgcccttccttgatattgcacctttggacatcggtggtgctgaccatgaattctttgtggacattggcccagtctgtttcaaataaatgaactcaatctaaattaaaaaagaaagaaatttgaaaaaactttctctttgccatttcttcttcttcttttttaactgaaagctgaatccttccatttcttctgcacatctacttgcttaaattgtgggcaaaagagaaaaagaaggattgatcagagcattgtgcaatacagtttcattaactccttcccccgctcccccaaaaatttgaatttttttttcaacactcttacacctgttatggaaaatgtcaacctttgtaagaaaaccaaaataaaaattgaaaaataaaaaccataaacatttgcaccacttgtggcttttgaatatcttccacagagggaagtttaaaacccaaacttccaaaggtttaaactacctcaaaacactttcccatgagtgtgatccacattgttaggtgctgacctagacagagatgaactgaggtccttgttttgttttgttcataatacaaaggtgctaattaatagtatttcagatacttgaagaatgttgatggtgctagaagaatttgagaagaaatactcctgtattgagttgtatcgtgtggtgtattttttaaaaaatttgatttagcattcatattttccatcttattcccaattaaaagtatgcagattatttgcccaaagttgtcctcttcttcagattcagcatttgttctttgccagtctcattttcatcttcttccatggttccacagaagctttgtttcttgggcaagcagaaaaattaaattgtacctattttgtatatgtgagatgtttaaataaattgtgaaaaaaatgaaataaagcatgtttggttttccaaaagaacatat

SEQ ID NO: 279 - DNA, 2236 bp, Homo sapiens
cgagcggcggcggagcaggcatttccagcagtgaggagacagccagaagcaagctattggagctgaaggaacctgagacagaagctagtcccccctctgaattttactgatgaagaaactgaggccacagagctaaagtgacttttcccaaggtcgcccagcgaggacgtgggacttctcagacgtcaggagagtgatgtgagggagctgtgtgaccatagaaagtgacgtgttaaaaaccagcgctgccctctttgaaagccagggagcatcattcatttagcctgctgagaagaagaaaccaagtgtccgggattcagacctctctgcggccccaagtgttcgtggtgcttccagaggcagggctatgctcacattcatggcctctgacagcgaggaagaagtgtgtgatgagcggacgtccctaatgtcggccgagagccccacgccgcgctcctgccaggagggcaggcagggcccagaggatggagagaacactgcccagtggagaagccaggagaacgaggaggacggtgaggaggaccctgaccgctatgtctgtagtggggttcccgggcggccgccaggcctggaggaagagctgaccctcaaatacggagcgaagcacgtgatcatgctgtttgtgcctgtcactctgtgcatgatcgtggtggtagccaccatcaagtctgtgcgcttctacacagagaagaatggacagctcatctacacgacattcactgaggacacaccctcggtgggccagcgcctcctcaactccgtgctgaacaccctcatcatgatcagcgtcatcgtggttatgaccatcttcttggtggtgctctacaagtaccgctgctacaagttcatccatggctggttgatcatgtcttcactgatgctgctgttcctcttcacctatatctaccttggggaagtgctcaagacctacaatgtggccatggactaccccaccctcttgctgactgtctggaacttcggggcagtgggcatggtgtgcatccactggaagggccctctggtgctgcagcaggcctacctcatcatgatcagtgcgctcatggccctagtgttcatcaagtacctcccagagtggtccgcgtgggtcatcctgggcgccatctctgtgtatgatctcgtggctgtgctgtgtcccaaagggcctctgagaatgctggtagaaactgcccaggagagaaatgagcccatattccctgccctgatatactcatctgccatggtgtggacggttggcatggcgaagctggacccctcctctcagggtgccctccagctcccctacgacccggagatggaagaagactcctatgacagttttggggagccttcataccccgaagtctttgagcctcccttgactggctacccaggggaggagctggaggaagaggaggaaaggggcgtgaagcttggcctcggggacttcatcttctacagtgtgctggtgggcaaggcggctgccacgggcagcggggactggaataccacgctggcctgcttcgtggccatcctcattggcttgtgtctgaccctcctgctgcttgctgtgttcaagaaggcgctgcccgccctccccatctccatcacgttcgggctcatcttttacttctccacggacaacctggtgcggccgttcatggacaccctggcctcccatcagctctacatctgagggacatggtgtgccacaggctgcaagctgcagggaattttcattggatgcagttgtatagttttacactctagtgccatatatttttaagacttttctttccttaaaaaataaagtacgtgtttacttggtgaggaggaggcagaaccagctctttggtgccagctgtttcatcaccagactttggctcccgctttggggagcgcctcgcttcacggacaggaagcacagcaggtttatccagatgaactgagaaggtcagattagggcggggagaagagcatccggcatgagggctgagatgcgcaaagagtgtgctcgggagtggcccctggcacctgggtgctctggctggagaggaaaagccagttccctacgaggagtgttcccaatgctttgtccatgatgtccttgttattttattgcctttagaaactgagtcctgttcttgttacggcagtcacactgctgggaagtggcttaatagtaatatcaataaatagatgagtcctgttagaaaaa

SEQ ID NO: 280 - DNA, 3539 bp, Homo sapiens
acggaccggcaggcctagctccggggctgcggcggctgaggcgcggggatggagcccctgcgggtgctggagctatacagcggcgtgggcggcatgcaccacgcgctgagagaaagctgtatacctgcacaagtggtggctgccattgatgtcaacactgtcgctaatgaagtatacaagtataattttcctcacacacagttacttgccaagacgattgaaggcattacactcgaagagtttgacagattatcttttgatatgattttaatgagccctccctgccagccattcacaaggattggccggcagggtgatatgactgattcaaggacgaatagcttcttacatattctagatattctcccaagattacaaaaattaccaaagtatattcttttggaaaatgttaaaggttttgaagtatcttctacaagagacctcttgatacaaacaatagaaaattgtggctttcagtaccaagagtttctattatctccaacctctcttggcattccaaattcaaggctacgatattttcttattgcaaagcttcagtcagagccattaccctttcaagcccctggtcaggtactgatggagttccccaaaattgaatctgtacatccacaaaaatatgcaatggatgtagaaaataaaattcaagaaaagaacgttgaaccaaatattagctttgatggcagcatacagtgttctggaaaagatgccattctttttaagcttgaaactgcagaagaaattcacaggaaaaatcaacaagatagtgatctctctgtgaaaatgctaaaagattttcttgaagatgacactgacgtgaaccagtatcttttaccaccaaagtcattgctgcgatatgctcttctgttagacattgttcagcccacttgtagaaggtccgtgtgctttaccaaaggatatggaagctacatagaagggacagggtctgtgttacagactgcagaggatgtgcaggttgagaatatctacaaatcccttaccaatttgtcacaagaagaacagataacaaagctgttaatacttaaactgcgatatttcactcctaaagaaatagcaaatctccttggatttcctccagagttcggatttcctgagaagataacagtgaaacagcgttatcgcctacttggaaatagtctcaacgtgcatgtagtagctaaactaatcaaaatcttatatgaataattttgaaataactctgaaagatggtcatatgatattccttcattttcagagagtaattctgaaattctgttttgaactaattctggtgaaatttaactaaattattttaatctgtccttattaagaaatttggattttattaaaaaaatccatgtgtttcatcaaatttatattactgtattttataaaatacgaactattgttatgctttatggagagtatattttcatatgaaactgataaatatatatgtggaatattctttttaaaaacaattttataaacaaatcaaggagcactagagctttagtgtctacatgagtatcttgtgaagtgtcataacaggcataacatatttttatgttaattaaagaagttttttatttctaattttaaaataatgattctaattctagcccattgaatgttttacttaatttccaatcctgtaaatatttctttatttcatctaaacaaatgcatatgatatgtaaaccaaattatcatcattcagtttatacagcagactgaagaatatgtcaggaaaaataatcctaaatgtttgattacctctccatgaagcggccacagaaactgttggtgcacattatctacattttcctcagcctctatctgaaggacaaaactcatttttccttcttcattttgtatgtactttcctttagttgactattatcaaagcttgtttttgtcttctcagcttctgagttgaatttgcctttgcacgctgaggaatgtagcatgacgttaagatttcagggaggaagctgccctctgatcccatgtcatatgacagtactcccctccccccagttgttctttattgtagcaacatacactctcaatgaacttttatgacttttaactttctctgtctctcttcctcagcagacctcttggaattagggtttctaatcaaactaagtcttgcatcataaattctatggtttgtgataaaagcaagtgacaaagagaagagagatgaaaagaaacaagtccagaaatcatattacaagattttaattcaaatttttcttcttaaaaatcagctatttagaggtggataaattggaagtttgtgcattgcttgtgggaacgtaaaatggttcagctgctgttggaaaacgctatggaggttcgtcacaaaattcaacatagaattaccctatgattcagcgattccacctctggctatagatccaaaagaattgaaagcagggacttgaacagatatttgtacaccagtgtttataacaccattatttacagtagccaaaaggtagaagcagcccaagtgtcatcccattcacccatgaatggatgcaggaattgtgttccgtgcatgcagtggaatagtaccagccttccgcaggaaggaaattctgacatatgcggtgacatggatgaaccttgagtacattatgcgaagtgaaataagccaccctgtggggatggagaatgggtagttagtgcataatggatacaaagtttctgattggggtgatgagaaagttctggaggtggatggggaggatggttgcacaacagtgtgagtgtacttaatgccactgcaactgtatatttaaaaatagttaaaatgataaattttacattatgtatattttactgcaattgaaaaaatcatactctattaccaatttttcagaactcatagataaatatgaatgtagggaagctgtaagccagcccatatacagaaactatcactatctacatttttcatatgtgttcagacagagcctattacaagtctcataaatttcagtaaacaatcacaaattattttggcacactttcatgtaggttctgttcactgctgaaatattctaaataaaatggtttagagttttactgtaactatgaataattatgctataattatagtatcccacattcggttgagcaacattatacaaaataagtgtcgagttactgtgcaccaactataaatacttgaaaggtctgtagagacatttgcttacaaactggtagacagaatgtagcttagtggaattcttaaattatgggaatgtattcacaggaagacggtgattcttgcccctaattcataattgaaaatatgcagtaacaagcataaaactcacatcttaatgaagatgtatctaccagtgtcattcaattagcagatgtatatgtatgcataattaatttggaaaatgttattttatggaatgtctgctatatgcttttggtaataatgttgtatataaaatctgcactggaaattctgtttcctgataaaaaaaaaaaaa

SEQ ID NO: 281 - DNA, 565 bp, Homo sapiens
ttttttttttttttttttcttagtggtttttattttcttggactaaggcaccgatgaattgactgtgcagcctcacactgccttctccaaaccaaaaggacattctcagggcctctcccagtgccctgcccgccagaggcctgcagcagcctgatgaggaggtcaagacgggcacttcacatccacttgtgtgctggctctgccaagacacgcttgtcatttctggggctcactgggagtcactgtcacaagacgggctgtccagccccgaaagagcacccttgctctccactccccaaacccttcagcactgcagacccagtgttcctccattctctgctgccatagtacactggggcatgccatgcaaatgcagctggagcaagccccagtctattgttcccctcgttcaccccagagatgcatccttccacatggaaacatggggtccacttgtcctgggaacagatgggagggcaggggcagctgctgtccacaggcaccggcgacagcagcctcagcgagcgtggcggggatggtggcggtgggggtggtggtggtgagg

SEQ ID NO: 282 - DNA, 3840 bp, Homo sapiens
gggaagttggctggctggcgaggcagagcctctcctcaaagcctggctcccacggaaaatatgctcagtgcagccgcgtgcatgaatgaaaacgccgccgggcgcttctagtcggacaaaatgcagccgagaactccgctcgttctgtgcgttctcctgtcccaggtgctgctgctaacatctgcagaagatttggactgcactcctggatttcagcagaaagtgttccatatcaatcagccagctgaattcattgaggaccagtcaattctaaacttgaccttcagtgactgtaagggaaacgacaagctacgctatgaggtctcgagcccatacttcaaggtgaacagcgatggcggcttagttgctctgagaaacataactgcagtgggcaaaactctgttcgtccatgcacggaccccccatgcggaagatatggcagaactcgtgattgtcggggggaaagacatccagggctccttgcaggatatatttaaatttgcaagaacttctcctgtcccaagacaaaagaggtccattgtggtatctcccattttaattccagagaatcagagacagcctttcccaagagatgttggcaaggtagtcgatagtgacaggccagaaaggtccaagttccggctcactggaaagggagtggatcaagagcctaaaggaattttcagaatcaatgagaacacagggagcgtctccgtgacacggaccttggacagagaagtaatcgctgtttatcaactatttgtggagaccactgatgtcaatggcaaaactctcgaggggccggtgcctctggaagtcattgtgattgatcagaatgacaaccgaccgatctttcgggaaggcccctacatcggccacgtcatggaagggtcacccacaggcaccacagtgatgcggatgacagcctttgatgcagatgacccagccaccgataatgccctcctgcggtataatatccgtcagcagacgcctgacaagccatctcccaacatgttctacatcgatcctgagaaaggagacattgtcactgttgtgtcacctgcgctgctggaccgagagactctggaaaatcccaagtatgaactgatcatcgaggctcaagatatggctggactggatgttggattaacaggcacggccacagccacgatcatgatcgatgacaaaaatgatcactcaccaaaattcaccaagaaagagtttcaagccacagtcgaggaaggagctgtgggagttattgtcaatttgacagttgaagataaggatgaccccaccacaggtgcatggagggctgcctacaccatcatcaacggaaaccccgggcagagctttgaaatccacaccaaccctcaaaccaacgaagggatgctttctgttgtcaaaccattggactatgaaatttctgccttccacaccctgctgatcaaagtggaaaatgaagacccactcgtacccgacgtctcctacggccccagctccacagccaccgtccacatcactgtcctggatgtcaacgagggcccagtcttctacccagaccccatgatggtgaccaggcaggaggacctctctgtgggcagcgtgctgctgacagtgaatgccacggaccccgactccctgcagcatcaaaccatcaggtattctgtttacaaggacccagcaggttggctgaatattaaccccatcaatgggactgttgacaccacagctgtgctggaccgtgagtccccatttgtcgacaacagcgtgtacactgctctcttcctggcaattgacagtggcaaccctcccgctacgggcactgggactttgctgataaccctggaggacgtgaatgacaatgccccgttcatttaccccacagtagctgaagtctgtgatgatgccaaaaacctcagtgtagtcattttgggagcatcagataaggatcttcacccgaatacagatcctttcaaatttgaaatccacaaacaagctgttcctgataaagtctggaagatctccaagatcaacaatacacacgccctggtaagccttcttcaaaatctgaacaaagcaaactacaacctgcccatcatggtgacagattcagggaaaccacccatgacgaatatcacagatctcagggtacaagtgtgctcctgcaggaattccaaagtggactgcaacgcggcaggggccctgcgcttcagcctgccctcagtcctgctcctcagcctcttcagcttagcttgtctgtgagaactcctgacgtctgaagcttgactcccaagtttccatagcaacaggaaaaaaaaaaatctatccaatctgaagattgcggtttacagctatcgaacttcacaactaggcctcaattgttccggttttttattttctttacaatttcacttagtctgtacttcatcattttgacagcatcttcctccctcctttaattaatggaatcttctgaattttccctgaatgtttaaagatcatgacatatgacttgatcttctgggagcaggaacaatgactactttttctggtgtgttaacatgtcgctagccagtgctccaggcacccagctttgtctgtgggttagtattggtgtatgtatgagtatctgtatgtatatatacacggtatttatagagagagactatcctggagaagcctcgttttgatgccattcttccttgcaaggttaagcaaggtgggtggaaactaagacacctgaaccctccagggcctcccgcatcaaggtcagcatgaggacagaccacagagctgtcacttttgctccgaagctacttctccactgtcccgttcagtctgaatgctgccacaaccagccaggcaggtccacagagagggagagcagagaaagaagtcctttctctttattgagttcgaggactacaaccaatttacactgccatctgatgccgtgatcctgagccaaggaggtgaggagcagagcaggcaatttcaccaccaaatgccaagaaaagggctgacattttctttcatgggcaccaacctgcatttgtatgtgtcccgaatccacagtcgtactgattctaatggggacacagatcatggtagagaatctctccctcctcagtaaatgtacaactgcacctgtcatcatggaggtcatacatgcatacaaagaggtgtacaggtaccatcttgtatacacatatatacccacatgtacagacatacatttatgcacattcacgctgtttgtttcatatatacaggcataaaatagagtaaatacaggtagttttaaaagtacccttttgtgtgaattgactaccgttgtttgcaaacccgaaaataaaagacgttcattatgtatgaaaagtaactgatttgtattctgtgagcatgtaaaagcggaaagttagtgcttgttctaagattaccttcttgttgataaaccataaatgaatcatcaaagctcacaccaaatttttctatcaaataaaactagtgacagcttgtggctttttattagagctcgccacgaactagggtaaggtgagtgtcttagcatattttaatgcagttgcttactaaaggttttaaccgcacatgcacacacacacgctttcttatgcaatctatgtttgcacttgtgctttcagttagccttctgtaggaagtagaagtcatatgttgtctttgttgtagtgaaattatacagatagagttccatatattgtatttgtttcaatggtaaatccttttggaacatatagaatgcagagatttttttttccattaaaataaatgggtattggtggttaaaaaaaaaaaaaaaaa

SEQ ID NO: 283 - DNA, 1637 bp, Homo sapiens
gaggcgaaccggagcgcggggccgcggtcgccccgaccagagccgggagaccgcagcacccgcagccgcccgcgagcgcgccgaagacagcgcgcaggcgagagcgcgcgggcgggggcgcgcaggccctgcccgccccttccgtccccacccccctccgccctttcctctccccaccttcctctcgcctcccgcgcccccgcaccgggcgcccaccctgtcctcctcctgcgggagcgttgtccgtgttggcggccgcagcgggccgggccggtccggcgggccgggggatggcgctgctggacctggccttggagggaatggccgtcttcgggttcgtcctcttcttggtgctgtggctgatgcatttcatggctatcatctacacccgattacacctcaacaagaaggcaactgacaaacagccttatagcaagctcccaggtgtctctcttctgaaaccactgaaaggggtagatcctaacttaatcaacaacctggaaacattctttgaattggattatcccaaatatgaagtgctcctttgtgtacaagatcatgatgatccagccattgatgtatgtaagaagcttcttggaaaatatccaaatgttgatgctagattgtttataggtggtaaaaaagttggcattaatcctaaaattaataatttaatgccaggatatgaagttgcaaagtatgatcttatatggatttgtgatagtggaataagagtaattccagatacgcttactgacatggtgaatcaaatgacagaaaaagtaggcttggttcacgggctgccttacgtagcagacagacagggctttgctgccaccttagagcaggtatattttggaacttcacatccaagatactatatctctgccaatgtaactggtttcaaatgtgtgacaggaatgtcttgtttaatgagaaaagatgtgttggatcaagcaggaggacttatagcttttgctcagtacattgccgaagattactttatggccaaagcgatagctgaccgaggttggaggtttgcaatgtccactcaagttgcaatgcaaaactctggctcatattcaatttctcagtttcaatccagaatgatcaggtggaccaaactacgaattaacatgcttcctgctacaataatttgtgagccaatttcagaatgctttgttgccagtttaattattggatgggcagcccaccatgtgttcagatgggatattatggtatttttcatgtgtcattgcctggcatggtttatatttgactacattcaactcaggggtgtccagggtggcacactgtgtttttcaaaacttgattatgcagtcgcctggttcatccgcgaatccatgacaatatacatttttttgtctgcattatgggacccaactataagctggagaactggtcgctacagattacgctgtgggggtacagcagaggaaatcctagatgtataactacagctttgtgactgtatataaaggaaaaaagagaagtattataaattatgtttatataaatgcttttaaaaatctaccttctgtagttttatcacatgtatgttttggtatctgttctttaatttatttttgcatggcacttgcatctgtgaaaaaaaa

SEQ ID NO: 284 - DNA, 3969 bp, Homo sapiens
ggcccagaaatagcagcggcgcgttcccctcggcgcagagcgacgggcagaggcgagagacgccgcggggccgggcggcggccccggaaggatgctgctgagccccggcactgcctggctgcgagcacatgatggcgatacgggagctcaaagtgtgccttctcggggacactggggttgggaaatcaagcatcgtgtgtcgatttgtccaggatcactttgaccacaacatcagccctactattggggcatcttttatgaccaaaactgtgccttgtggaaatgaacttcacaagttcctcatctgggacactgctggtcaggaacggtttcattcattggctcccatgtactatcgaggctcagctgcagctgttatcgtgtatgatattaccaagcaggattcattttataccttgaagaaatgggtcaaggagctgaaagaacatggtccagaaaacattgtaatggccatcgctggaaacaagtgcgacctctcagatattagggaggttcccctgaaggatgctaaggaatacgctgaatccataggtgccatcgtggttgagacaagtgcaaaaaatgctattaatatcgaagagctctttcaaggaatcagccgccagatcccacccttggacccccatgaaaatggaaacaatggaacaatcaaagttgagaagccaaccatgcaagccagccgccggtgctgttgacccaagggccgtggtccacggtacttgaagaagccagagcccacatcctgtgcactgctgaaggaccctacgctcggtggcctggcacctcactttgagaagagtgagcacactggctttgcatcctggaagacctgcagggggcggggcaggaaatgtacctgaaaaggattttagaaaaccctgggaaaacccaccacaccaccacaaaatggcctttagtgtatgaaatgcacatggaggggatgtagttgcatttttgctaaaaaaaaaaaaaaacctttaaaaattgttggatgtgtacaaaagtcttactgccttattatgtgtatgggattctaaagtggcattccacttggatttcctgtgctacctatcccaaattcccagtaactacttcagtgtcattgcctttgttacctaaccaaccttcactgaaaggcaaatttagttcaggaggttagtttttagctagctttggaagtaagcctttatttattactttttggaggaaatcagagaagtgtcaatggaccgtcactcagactgagacttgagttattacagaagccaggaaaagtgtattagaaactgttgtctacaccacttttaattggtgaacaatttttctaagttatggtcatatatacccaaacaaaccaaatcaaactaaattactgcatataattttgggattgggtggcctagtttgaaagagtgatttaagtaatcactatgtaagtggtgagagatgcaggacatacacattattcaagagaccacctgacatgcatctcctccgcaggaatacattcgtcctctcttagagaagtttaacgcacatagtattattttactaagagaatatctcttggtgtcatatctaggggaagagaattaactagaattaaatttaatgtttgaatctaaatcattgggcaaacttctaataataacaattaataataggttacaggaaagccagccagaggaagtgtcagcactttaaaattctagaccccaaaaaactacaaaatcagaaaaagtatttttatgtttctagcttgaggagaagggctttagggctaaccagaggtctgaccctagaatgccaaggaactgagaatgggctccgatgaaaaccttccttttcagattccctgtctgctcaattaaagatgtttgaatccaaaggaagtcaaggaagaaaaagcatggaaaggaagagaactgattcctactgaaaattcaaattctattaccattctaactttcataaaaagttgggatcaagaagcagctgatttcctgccagggcttatattagggggtgattcttaaaggacattaggattggtgctcagaaatggttaatcatgctgtgtgctagccagggccagctggtaccttctttgccatgagcattcaagggacagctaacctttattgacaatctatattgcaaaagtcaggaaagaggttgtgagctgattggattaaagacctggcacttcagtaactcagcacgcttccacttcactcaacttaagagagttcattgacagtgttaggatgtgaaggctgggaaacacttattttgcttcaagagttccacttggctctcccaaataggtacctcaaaaactgttagcaagcggcatttggatgtcttgacaggggctttgcagggatttttagggttttttccacattgtccacattaatggttggcatgattgtgcttgcaggccaagaaatgatcataccccttgccaaaggtaaaaaaaaaaaaaaaaaaatgagttgaaaattgaagtgacctctttccagctgacttgcaggcttattttgtaacctttcctcatccagttttccctgagaacctgggtttatctctagatagctgttcaggttttttagctgaggggtaagtatcctagctgagagttttgcatctttgggctgggtttgcagtggttgtgttttgcataaaatgtctagtctttgccacagatagtgagctacccactaatgagcccatggttttatttcagaagcacatgagggtgtgaaaccactctgttacctttctgtattgtcttagctattcaagccagtcagaggataatatatatattctcatcagcactcagagtagtcagtgaagagagtaggatcacacttggggcacaccaggattcacataaacattgtatcttctctgtggatgctcaggccttgtctacaatgaggctttacaaccttccttgtttggctcgggattacttcctggctgtctaataattgaaccataaccatgtaatattatgtaaaggcctggaaattactgttgctaaaaaaagtcatgtagtttcatgtagtgtagcatccttggcatcgttttccaaaatttgttccttctcccttttttttttctttcgtgtgtggcatgagtgtgtatctgtgtaaatatgattgtatatgtgttactccgatatgtaatccatttcactggctgagtttggcccctagccatgtgttaatataaagtagggcatgggcttcccaatggaaatctctgagaatgacagtggagttgtgcaagcattttacattgccacataattgacttgccattttatggttaaaaacgggcacattaggcagttgaatatgacgttaccttgcagactaaaaggttgaaggcccgaaactaacttttagctaacaataagggctgtgccccaatggaaactgagttcattttctgagaaaggtttggatgactgaaatatttcctctacagtcaaggactttggcatgcggtggctgaaactgagcttttttgtgtgggctccagttctcactgttctgcaatgctcatggcaagttgaatggtgagctagcttataaattaaagagctctgaactgtattcagaccgactgggtatctagcttactgttttaacatcattgttgaaaccagaccctgtagtccagtggtgctgccctgttgtgcaaactgctcctttttctcgtgtttttgtaaagagcttccatctgggctggacccagttcttgcacatacaagacaccgctgcagtcagctaggacctttccgccatgtattctattctgtagtaaagcatttccatcaacaatgcctaattgtatctgttatttttggtttaacacacactgattcatactaataaatattttcagttttaaaaaaaaaaaaaaaaaaaaaaa

SEQ ID NO: 285 - DNA, 595 bp, Homo sapiens
gggcaaggctgggccgggaagggcgtgggttgaggagaggctccagacccgcacgccgcgcgcacagagctctcagcgccgctcccagccacagcctcccgcgcctcgctcagctccaacatggcaaaaatctccagccctacagagactgagcggtgcatcgagtccctgattgctgtcttccagaagtatgctggaaaggatggttataactacactctctccaagacagagttcctaagcttcatgaatacagaactagctgccttcacaaagaaccagaaggaccctggtgtccttgaccgcatgatgaagaaactggacaccaacagtgatggtcagctagatttctcagaatttcttaatctgattggtggcctagctatggcttgccatgactccttcctcaaggctgtcccttcccagaagcggacctgaggaccccttggccctggccttcaaacccaccccctttccttccagcctttctgtcatcatctccacagcccacccatcccctgagcacactaaccacctcatgcaggccccacctgccaatagtaataaagcaatgtcacttttttaaaacatgaaa

SEQ ID NO: 286 - DNA, 9662 bp, Homo sapiens
gagcccggcccgggggacgggcggcgggatagcgggaccccggcgcggcggtgcgcttcagggcgcagcggcggccgcagaccgagccccgggcgcggcaagaggcggcgggagccggtggcggctcggcatcatgcgtcgagggcgtctgctggagatcgccctgggatttaccgtgcttttagcgtcctacacgagccatggggcggacgccaatttggaggctgggaacgtgaaggaaaccagagccagtcgggccaagagaagaggcggtggaggacacgacgcgcttaaaggacccaatgtctgtggatcacgttataatgcttactgttgccctggatggaaaaccttacctggcggaaatcagtgtattgtccccatttgccggcattcctgtggggatggattttgttcgaggccaaatatgtgcacttgcccatctggtcagatagctccttcctgtggctccagatccatacaacactgcaatattcgctgtatgaatggaggtagctgcagtgacgatcactgtctatgccagaaaggatacatagggactcactgtggacaacctgtttgtgaaagtggctgtctcaatggaggaaggtgtgtggccccaaatcgatgtgcatgcacttacggatttactggaccccagtgtgaaagagattacaggacaggcccatgttttactgtgatcagcaaccagatgtgccagggacaactcagcgggattgtctgcacaaaacagctctgctgtgccacagtcggccgagcctggggccacccctgtgagatgtgtcctgcccagcctcacccctgccgccgtggcttcattccaaatatccgcacgggagcttgtcaagatgtggatgaatgccaggccatccccgggctctgtcagggaggaaattgcattaatactgttgggtcttttgagtgcaaatgccctgctggacacaaacttaatgaagtgtcacaaaaatgtgaagatattgatgaatgcagcaccattcctggaatctgtgaagggggtgaatgtacaaacacagtcagcagttacttttgcaaatgtccccctggtttttacacctctccagatggtaccagatgcatagatgttcgcccaggatactgttacacagctctgacaaacgggcgctgctctaaccagctgccacagtccataaccaaaatgcagtgctgctgtgatgccggccgatgctggtctccaggggtcactgtcgcccctgagatgtgtcccatcagagcaaccgaggatttcaacaagctgtgctctgttcctatggtaattcctgggagaccagaatatcctcccccaccccttggccccattcctccagttctccctgttcctcctggctttcctcctggacctcaaattccggtccctcgaccaccagtggaatatctgtatccatctcgggagccaccaagggtgctgccagtaaacgttactgattactgccagttggtccgctatctctgtcaaaatggacgctgcattccaactcctgggagttaccggtgtgagtgcaacaaagggttccagctggacctccgtggggagtgtattgatgttgatgaatgtgagaaaaacccctgtgctggtggtgagtgtattaacaaccagggttcgtacacctgtcagtgccgagctggatatcagagcacactcacgcggacagaatgccgagacattgatgagtgtttacagaatggccggatctgcaataatggacgctgcatcaacacagatggcagttttcattgcgtgtgtaatgcgggctttcatgttacacgagatgggaagaactgtgaagatatggatgaatgcagcataaggaacatgtgccttaatggaatgtgtatcaatgaagatggcagttttaaatgtatttgcaaacctggattccagctggcatcagatggacgttattgcaaagacattaacgagtgtgaaacccctgggatctgcatgaatgggcgttgcgtcaacactgatggctcctacagatgtgaatgcttccctggactggctgtgggtctggatggccgtgtgtgtgttgacacacacatgcggagcacatgctatggtggatacaagagaggccagtgtatcaaacctttgtttggtgctgtcactaaatctgaatgctgttgcgccagcactgagtatgcatttggggaaccttgccagccgtgtcctgcacagaattcagcggaatatcaggcactctgcagcagtgggccaggaatgacgtcagcaggcagtgatataaatgaatgtgcactagatcctgatatttgcccaaatggaatctgtgaaaaccttcgtgggacctataaatgtatatgcaattcaggatatgaagtggattcaactgggaaaaactgcgttgatattaatgaatgtgtactgaacagtctcctttgtgacaatggacaatgtagaaatactcctggaagttttgtctgtacctgccccaagggatttatctacaaacctgatctaaaaacatgtgaagacattgatgaatgcgaatcaagtccttgcattaatggagtctgcaagaacagcccaggctcttttatttgtgaatgttcttctgaaagtactttggatccaacaaaaaccatctgcatagaaaccatcaagggcacttgctggcagactgtcattgatgggcgatgtgagatcaacatcaatggagccaccttaaagtcccagtgctgctcctccctcggtgctgcgtggggaagcccgtgcaccctatgccaagttgatcccatatgtggtaaagggtactcaagaattaaaggaacacaatgtgaagatatagatgaatgtgaagtgttcccaggagtgtgtaaaaatggcctgtgtgttaacactagggggtcattcaagtgtcagtgtcccagtggaatgactttggatgccacaggaaggatctgtcttgatatccgcctggaaacctgcttcctgaggtacgaggacgaggagtgcaccctgcctattgctggccgccaccgcatggacgcctgctgctgctccgtcggggcagcctggggtactgaggaatgcgaggagtgtcccatgagaaatactcctgagtacgaggagctgtgtccgagaggacccggatttgccacaaaagaaattacaaatggaaagcctttcttcaaagatatcaatgagtgcaagatgatacccagcctctgcacccacggcaagtgcagaaacaccattggcagctttaagtgcaggtgtgacagcggctttgctcttgattctgaagaaaggaactgcacagacattgacgaatgccgcatatctcctgacctctgtggcagaggccagtgtgtgaacacccctggggactttgaatgcaagtgtgacgaaggctatgaaagtggattcatgatgatgaagaactgcatggatattgatgagtgtcagagagatcctctcctatgccgaggtggtgtttgccataacacagagggaagttaccgctgtgaatgcccgcctggccatcagctgtcccccaacatctccgcgtgtatcgacatcaatgaatgtgagctgagtgcacacctgtgccccaatggccgttgcgtgaacctcatagggaagtatcagtgtgcctgcaaccctggctaccattcaactcccgataggctattttgtgttgacattgatgaatgcagcataatgaatggtggttgtgaaaccttctgcacaaactctgaaggcagctatgaatgtagctgtcagccgggatttgcactaatgcctgaccagagatcatgcaccgacatcgatgagtgtgaagataatcccaatatctgtgatggtggtcagtgcacaaatatccctggagagtacaggtgcttgtgttatgatggattcatggcatctgaagacatgaagacttgtgtagatgtcaatgagtgtgacctgaatccaaatatctgcctaagtgggacctgtgaaaacacgaaaggctcatttatctgccactgtgatatgggctactccggcaaaaaaggaaaaactggctgtacagacatcaatgaatgtgaaattggagcacacaactgtggcaaacatgctgtatgtaccaatacagcaggaagcttcaaatgtagctgcagtcccgggtggattggagatggcattaagtgcactgatctggacgaatgttccaatggaacccatatgtgcagccagcatgcagactgcaagaataccatgggatcttaccgctgtctgtgcaaggaaggatacacaggtgatggcttcacttgtacagaccttgatgagtgctctgagaacctgaatctctgtggcaatggccagtgcctcaatgcaccaggaggataccgctgtgaatgcgacatgggcttcgtgcccagtgctgacgggaaagcctgtgaagatattgatgagtgctcccttccgaacatctgtgtctttggaacttgccacaacctccctggcctgttccgctgtgagtgtgagataggctacgaactggacagaagcggcgggaactgcacagatgtgaatgaatgcctggatccaaccacgtgcatcagtgggaactgtgtcaacactccaggcagctatatctgtgactgcccacctgattttgaactgaacccaactcgagttggctgtgttgatacccgctctggaaattgctatttggatattcgacctcgaggagacaatggagatacagcctgcagcaatgaaattggagttggtgtttccaaagcttcctgctgctgttctctgggtaaagcctggggtactccttgtgagatgtgtcctgctgtgaacacatccgagtacaaaattctttgtcctggaggggaaggtttccgaccaaatcctatcaccgttatattggaagatattgatgagtgccaggagctaccagggctgtgccaaggaggaaaatgtatcaacacctttgggagtttccagtgccgctgtccaaccggctactacctgaatgaagatacacgagtgtgtgatgatgtgaatgaatgtgagactcctggaatctgtggtccagggacatgttacaacaccgttggcaactacacctgtatctgtcctccagactacatgcaagtgaatgggggaaataattgcatggatatgagaagaagtttgtgctacagaaactactatgctgacaaccagacctgtgatggagaattgttattcaacatgaccaagaagatgtgctgctgttcctacaacattggccgggcgtggaacaagccctgtgaacagtgtcccatcccaagtacagatgagtttgctacactctgtggaagtcaaaggccaggctttgtcatcgacatttataccggtttacccgttgatattgatgagtgccgggagatcccaggggtctgtgaaaatggagtgtgtatcaacatggttggcagcttccgatgtgaatgtccagtgggattcttctataatgacaagttgttggtttgtgaagatattgacgagtgtcagaacggcccagtgtgccagcgcaacgccgaatgcatcaacactgcaggcagctaccgctgtgactgtaagcccggctaccgcttcacctccacaggacagtgcaatgatcgtaatgaatgtcaagaaatccccaatatatgcagtcatgggcagtgcattgacacagttggaagcttttattgcctttgccacactggttttaaaacaaatgatgaccaaaccatgtgcttggacataaatgaatgtgaaagagatgcctgtgggaatggaacttgccggaacacaattggttccttcaactgccgctgcaatcatggtttcatcctttctcacaacaatgactgtatagatgttgatgaatgtgcaagtggaaatgggaatctttgcagaaatggccaatgcattaatacagtggggtctttccagtgccagtgcaatgaaggctatgaggtggctccagatgggaggacctgtgtggatatcaatgaatgtcttctagaacccagaaaatgtgcaccaggtacctgtcaaaacttggatgggtcctacagatgcatttgcccacctggatacagtcttcaaaatgagaagtgtgaagatattgatgagtgtgtcgaagagccagaaatttgtgccctgggcacatgcagtaacactgaaggcagcttcaaatgtctgtgtccagaagggttttccttgtcctccagtggaagaaggtgccaagatttgcgaatgagctactgttatgcgaagtttgaaggaggaaagtgttcatcacccaaatccagaaatcactccaagcaggaatgctgctgtgccttgaagggagaaggctggggagacccctgcgagctctgccccacggaacctgatgaggccttccgccagatatgtccttatggaagtgggatcatcgtgggacctgatgattcagcagttgatatggacgaatgcaaagaacccgatgtctgtaaacatggacagtgcatcaatacagatggttcctatcgctgcgagtgtccctttggttatactctagcagggaatgaatgtgtagatactgatgaatgttctgttggcaatccttgtggaaatggaacctgcaagaatgtgattggaggttttgaatgcacctgcgaggagggatttgagcccggtccaatgatgacatgtgaagatataaatgaatgtgcccagaatcctctgctctgtgccttccgatgtgtgaacacttatgggtcatatgaatgcaaatgtcccgtgggatatgtgctcagagaagaccgtaggatgtgcaaagatgaggatgagtgtgaagagggaaaacatgactgtactgaaaaacaaatggaatgcaagaacctcattggcacatatatgtgcatctgtggacccgggtatcagcggagacctgatggagaaggctgtgtagatgagaatgaatgtcagacgaagccagggatctgtgagaatgggcgctgcctcaacacccgtgggagctacacctgtgagtgtaatgatgggtttaccgccagccccaaccaggacgagtgccttgacaatcgggaagggtactgcttcacagaggtgctacaaaacatgtgtcagatcggctccagcaacaggaaccccgtcaccaaatcggaatgctgctgtgacggagggagaggctggggtccccactgtgagatctgccctttccaggggactgtggctttcaagaaactctgtccccatggccgaggattcatgaccaatggagcagatatcgatgaatgcaaggttattcacgatgtttgccgaaatggggaatgtgtcaatgacagaggatcatatcattgcatttgtaaaactgggtacactccagatataactgggacttcctgtgtagatctgaacgagtgcaaccaggctcccaaaccctgcaattttatctgcaaaaacacagaagggagttaccagtgttcatgcccgaaaggctacattctgcaagaggatggaaggagctgcaaagatcttgatgagtgtgcaaccaagcaacacaactgccagttcctatgtgttaacaccattggcggcttcacatgcaaatgtcctcccggatttacccaacaccatacgtcctgcattgataacaatgaatgcacctctgacatcaatctgtgcgggtctaagggcatttgccagaacactcctggaagcttcacctgtgaatgccagcggggattctcacttgatcagaccggctccagctgtgaagacgtggacgagtgtgagggtaaccaccgctgccagcatggctgccagaacatcattgggggctacaggtgcagctgcccccagggctacctccagcactaccagtggaaccagtgtgttgatgaaaacgaatgcctcagcgctcacatctgcggaggagcctcctgtcacaacaccctggggagctacaagtgcatgtgtcccgccggcttccagtatgaacagttcagtggaggatgccaagacatcaatgaatgtggctctgcgcaggccccctgcagctatggctgttccaataccgagggcggttacctgtgtggctgtccacctggttacttccgcataggccaagggcactgtgtttctggaatgggcatgggccgaggaaacccagagccacctgtcagtggtgaaatggatgacaattcactctccccagaggcttgttacgagtgtaagatcaatggctaccccaaacggggcaggaaacggagaagcacaaacgaaactgatgcctccaatatcgaggatcagtctgagacagaagccaatgtgagtcttgcaagttgggatgttgagaagacagccatctttgctttcaatatttcccacgtcagtaacaaggttcgaatcctagaactccttccagctcttacaactctgacgaatcacaacagatacttgatcgaatctggaaatgaagatggcttctttaaaatcaaccaaaaggaagggatcagctacctccacttcacaaagaagaagccagtggctggaacctattcattacaaatcagtagtactccactttataaaaagaaagaacttaaccaactagaagacaaatatgacaaagactacctcagtggtgaactgggtgataatctgaagatgaaaatccaggttttgcttcattaattcaccatccagaaccaaataattaaaagaaaaacaaatatagataggtagaactatattttcccccaatcagaatcatcatatcataggtacaatctttcaccaagtaaatttgtataaataagcactattctttgtattaccaaagcaaggtacaggtgactaccctagttcaaaacaaccactttctcaggcttctcatgtgtgtagctaagctaccttgtcatatgtgttgattcttgaaaactgggacgtgtatttccattgggggttggccatttatgctgacatgccatccttccagcaaacgtagggaatgtgctttcaattgatggactactctattttttgcaaatttgtaaactttgcttctccaaatacaagtactaggttgtccatttatggtacctatttggtgctagtaaattttcaaactagatttataaatgcactgtaatatgtacacaacttagaaaccaaattacaagtattcagttccaatacttcattaatttcaatcaaccaaagttagttcagtagcttatctcagttatgagtataatacattacatgtaaattaagtgtgtgtatactgtaatcgtgctattttttatcattgaaacatttataaactagaataataatgcccttaatgtgagggtttgtaatggtgcttattaagaccaaagacttgttaaatgtatacaccaagtggtaatgaaatttcgtgactggcccacacgtgcatagaggtctgggaggaccaggaaacagcctcagtggccagaggatcaccagtgcatccttcatcacagcatgtgcaatatgccaagattaccctcggtcattcctgtcaacaaggggtcaatgtcataaatgtcacaataaaacaatctcttcttttttttagttt

SEQ ID NO: 287 - DNA, 914 bp, Homo sapiens
aaacatctcctgaccatatcagtagctcgtgttatctttttatcaactgcttcccagagtcctaaaacaatagaaattttggattgaaaagttcagcataaggagtttgagtcagtaaaggatgggataaaggagtcgagatgattcaatgaaaagtatcacaaaaaagagattgatcaacaagagaaataaaaaagcccaagaggaagtggtaggggaaggaatttaagaacagcaataagtaaaactcttaagtaactccaaaaagaaaatggtacattttgccaaagaccacttatacttgagaacatggaagaatttgcctgatactctctttggggaaaagagtctctcctcttttcctcaaaccccagtacactcagcctctctgccccaccttctcctgactttgtcctcacttgcttctgcagtacattggaacctgaattgaaagaaagtcttccttgaataattggagtttgtcttgagaggcaaatatagccccaagaatcacaagattcgaggaccatgtaggtcttttacgtagcccaaatccataaattagtctcactttttgtatttatcgtttcatatttaaaccctctatatcaaatgttcatcatgattttgtactgatttttataactattttattcattttattagatttattctaaaattttttaatggtaaattcttaaactgtggaaaccactgaaggtgcttattaactgttctcccagatttgttcagtattggatgattccttgagttacagtgtcaattagtgtggaaataactttttcaaaaaaaaaaagggggcgccaaatatcctgagggccagctaaggtaccgattctgcacagggccatagggtatacagaaggccgcgtaaccgaaggaagtccggaatg

SEQ ID NO: 288 - DNA, 3935 bp, Homo sapiens
tccctcgctcaccccatcctctctcccgccccttcctggattccctcacccgtctcgatcccctctccgccctttcccagagacccagagcccctgaccccccgcgccctccccggagccccccgcgcgtgccgcggccatggcggccgtgcgcggggcgcccctgctcagctgcctcctggcgttgctggccctgtgccctggagggcgcccgcagacggtgctgaccgacgacgagatcgaggagttcctcgagggcttcctgtcagagctagaacctgagccccgggaggacgacgtggaggccccgccgcctcccgagcccaccccgcgggtccgaaaagcccaggcggggggcaagccagggaagcggccagggacggccgcagaagtgcctccggaaaagaccaaagacaaagggaagaaaggcaagaaagacaaaggccccaaggtgcccaaggagtccttggaggggtcccccaggccgcccaagaaggggaaggagaagccacccaaggccaccaagaagcccaaggagaagccacctaaggccaccaagaagcccaaggaggagccacccaaggccaccaagaagcccaaagagaagccacccaaggccaccaagaagcccccgtcagggaagaggccccccattctggctccctcagaaaccctggagtggccactgcccccaccccccagccctggccccgaggagctaccccaggagggaggggcgcccctctcaaataactggcagaatccaggagaggagacccatgtggaggcacaggagcaccagcctgagccggaggaggagaccgagcaacccacactggactacaatgaccagatcgagagggaggactatgaggactttgagtacattcggcgccagaagcaacccaggccacccccaagcagaaggaggaggcccgagcgggtctggccagagccccctgaggagaaggccccggccccagccccggaggagaggattgagcctcctgtgaagcctctgctgcccccgctgccccctgactatggtgatggttacgtgatccccaactacgatgacatggactattactttgggcctcctccgccccagaagcccgatgctgagcgccagacggacgaagagaaggaggagctgaagaaacccaaaaaggaggacagcagccccaaggaggagaccgacaagtgggcagtggagaagggcaaggaccacaaagagccccgaaagggcgaggagttggaggaggagtggacgcctacggagaaagtcaagtgtccccccattgggatggagtcacaccgtattgaggacaaccagatccgagcctcctccatgctgcgccacggcctgggggcacagcgcggccggctcaacatgcagaccggtgccactgaggacgactactatgatggtgcgtggtgtgccgaggacgatgccaggacccagtggatagaggtggacaccaggaggactacccggttcacaggcgtcatcacccagggcagagactccagcatccatgacgattttgtgaccaccttcttcgtgggcttcagcaatgacagccagacatgggtgatgtacaccaacggctatgaggaaatgacctttcatgggaacgtggacaaggacacacccgtgctgagtgagctcccagagccggtggtggctcgtttcatccgcatctacccactcacctggaatggcagcctgtgcatgcgcctggaggtgctggggtgctctgtggcccctgtctacagctactacgcacagaatgaggtggtggccaccgatgacctggatttccggcaccacagctacaaggacatgcgccagctcatgaaggtggtgaacgaggagtgccccaccatcacccgcacttacagcctgggcaagagctcacgaggcctcaagatctatgccatggagatctcagacaaccctggggagcatgaactgggggagcccgagttccgctacactgctgggatccatggcaacgaggtgctgggccgagagctgttgctgctgctcatgcagtacctgtgccgagagtaccgcgatgggaacccacgtgtgcgcagcctggtgcaggacacacgcatccacctggtgccctcactgaaccctgatggctacgaggtggcagcgcagatgggctcagagtttgggaactgggcgctgggactgtggactgaggagggctttgacatctttgaagatttcccggatctcaactctgtgctctggggagctgaggagaggaaatgggtcccctaccgggtccccaacaataacttgcccatccctgaacgctacctttcgccagatgccacggtatccacggaggtccgggccatcattgcctggatggagaagaaccccttcgtgctgggagcaaatctgaacggcggcgagcggctagtatcctacccctacgatatggcccgcacgcctacccaggagcagctgctggccgcagccatggcagcagcccggggggaggatgaggacgaggtctccgaggcccaggagactccagaccacgccatcttccggtggcttgccatctccttcgcctccgcacacctcaccttgaccgagccctaccgcggaggctgccaagcccaggactacaccggcggcatgggcatcgtcaacggggccaagtggaacccccggaccgggactatcaatgacttcagttacctgcataccaactgcctggagctctccttctacctgggctgtgacaagttccctcatgagagtgagctgccccgcgagtgggagaacaacaaggaggcgctgctcaccttcatggagcaggtgcaccgcggcattaagggggtggtgacggacgagcaaggcatccccattgccaacgccaccatctctgtgagtggcattaatcacggcgtgaagacagccagtggtggtgattactggcgaatcttgaacccgggtgagtaccgcgtgacagcccacgcggagggctacaccccgagcgccaagacctgcaatgttgactatgacatcggggccactcagtgcaacttcatcctggctcgctccaactggaagcgcatccgggagatcatggccatgaacgggaaccggcctatcccacacatagacccatcgcgccctatgaccccccaacagcgacgcctgcagcagcgacgcctacaacaccgcctgcggcttcgggcacagatgcggctgcggcgcctcaacgccaccaccaccctaggcccccacactgtgcctcccacgctgccccctgcccctgccaccaccctgagcactaccatagagccctggggcctcataccgccaaccaccgctggctgggaggagtcggagactgagacctacacagaggtggtgacagagtttgggaccgaggtggagcccgagtttgggaccaaggtggagcccgagtttgagacccagttggagcctgagttcgagacccagctggaacccgagtttgaggaagaggaggaggaggagaaagaggaggagatagccactggccaggcattccccttcacaacagtagagacctacacagtgaactttggggacttctgagatcagcgtcctaccaagaccccagcccaactcaagctacagcagcagcacttcccaagcctgctgaccacagtcacatcacccatcagcacatggaaggcccctggtatggacactgaaaggaagggctggtcctgcccctttgagggggtgcaaacatgactgggacctaagagccagaggctgtgtagaggctcctgctccacctgccagtctcgtaagagatggggttgctgcagtgttggagtaggggcagagggagggagccaaggtcactccaataaaacaagctcatggcaaaaaaaaaaaaaaaaaaaaa

SEQ ID NO: 289 - DNA, 2083 bp, Homo sapiens
actttagccagcgcagggcgcaccccgctccctcccactctccctgcccctcggaccccatactctacctcatccttctggccaggcgaagcccacgacgttgacatgccggagatccgcctccgccatgtcgtgtcctgcagcagccaggactcgactcactgtgcagaaaatcttctcaaggcagacacttaccgaaaatggcgggcagccaaggcaggcgagaagaccatctctgtggtcctacagttggagaaggaggagcagatacacagtgtggacattgggaatgatggctcagctttcgtggaggtgctggtgggcagttcagctggaggcgctggggagcaagactatgaggtccttctggtcacctcatctttcatgtccccttccgagagccgcagtggctcaaaccccaaccgcgttcgcatgtttgggcctgacaagctggtccgggcagccgccgagaagcgctgggaccgggtcaaaattgtttgcagccagccctacagcaaggactccccctttggcttgagttttgtacggtttcatagccccccagacaaagatgaggcagaggccccgtcccagaaggtgacagtgaccaagcttggccagttccgtgtgaaggaggaggatgagagcgccaactctctgaggccgggggctctcttcttcagccggatcaacaagacatccccagtcacagccagcgacccggcaggacctagctatgcagctgctaccctccaggcttctagtgctgcctcctcagcctctccagtctccagggccataggcagcacctccaagccccaggagtctcccaaagggaagaggaagttggatttgaaccaagaagaaaagaagacccccagcaaaccaccagcccagctgtcgccatctgttcccaagagacctaaattgccagctccaactcgtaccccagccacagccccagtccctgcccgagcacagggggcagtgacaggcaaaccccgaggagaaggcaccgagcccagacgaccccgagctggcccagaggagctggggaagatccttcagggtgtggtagtggtgctgagtggcttccagaaccccttccgctccgagctgcgagataaggccctagagcttggggccaagtatcggccagactggacccgggacagcacgcacctcatctgtgcctttgccaacacccccaagtacagccaggtcctaggcctgggaggccgcatcgtgcgtaaggagtgggtgctggactgtcaccgcatgcgtcggcggctgccctcccggaggtacctcatggcagggccaggttccagcagtgaggaggatgaggcctctcacagcggtggcagcggagatgaagcccccaagcttcctcagaagcaaccccagaccaaaaccaagcccactcaggcagctggacccagctcaccccagaagcccccaacccctgaagagaccaaagcagcctcaccagtgctccaggaagatatagacattgagggggtacagtcagaaggacaggacaatggggcggaagattctggggacacagaggatgagctgaggagggtggcagagcagaaggaacacagactgccccctggccaggaggagaatggggaagacccgtatgcaggctccacggatgagaacacggacagtgaggaacaccaggagcctcctgatctgccagtccctgagctcccagatttcttccagggcaagcacttctttctttacggggagttccctggggacgagcggcggaaactcatccgatacgtcacagccttcaatggggagctcgaggactatatgagtgaccgggttcagtttgtgatcacagcacaggaatgggatcccagctttgaggaggccctgatggacaacccctccctggcattcgttcgtccccgatggatctacagttgcaatgagaagcagaagttacttcctcaccagctctatggggtggtgccgcaagcctgaagtatgtgctatacacacacacacacacacacacacacacacacacgatgcatttaataaagatgagttggttctc

SEQ ID NO: 290 - DNA, 1770 bp, Homo sapiens
gaggagtggattacatattccaacagttgttattacattggtaaggaaagaagaacttgggaagaaagagtttgctggcctgtgcttcgaagaactctgatctgctttctatagataatgaggaagaaatggtatgtgtggggacttcccagttggctgtaagttgccatttgaactaaacgaaatagatcaggaactgaggacatatctaaattttctagttttatagaaggcttttatccacaagaatcaagatcttccctctctgagcaggaatcctttgtgcattgaagactttagattcctctctgcggtagacgtgcacttataagtatttgatggggtggattcgtggtcggaggtctcgacacagctgggagatgagtgaatttcataattataacttggatctgaagaagagtgatttttcaacacgatggcaaaagcaaagatgtccagtagtcaaaagcaaatgtagagaaaatgcatctccattttttttctgctgcttcatcgctgtagccatgggaatccgtttcattattatggtagcaatatggagtgctgtattcctaaactcattattcaaccaagaagttcaaattcccttgaccgaaagttactgtggcccatgtcctaaaaactggatatgttacaaaaataactgctaccaattttttgatgagagtaaaaactggtatgagagccaggcttcttgtatgtctcaaaatgccagccttctgaaagtatacagcaaagaggaccaggatttacttaaactggtgaagtcatatcattggatgggactagtacacattccaacaaatggatcttggcagtgggaagatggctccattctctcacccaacctactaacaataattgaaatgcagaagggagactgtgcactctatgcctcgagctttaaaggctatatagaaaactgttcaactccaaatacatacatctgcatgcaaaggactgtgtaaagatgatcaaccatctcaataaaagccaggaacagagaagagattacaccagcggtaacactgccaaccgagactaaaggaaacaaacaaaaacaggacaaaatgaccaaagactgtcagatttcttagactccacaggaccaaaccatagaacaatttcactgcaaacatgcatgattctccaagacaaaagaagagagatcctaaaggcaattcagatatccccaaggctgcctctcccaccacaagcccagagtggatgggctgggggaggggtgctgttttaatttctaaaggtaggaccaacacccaggggatcagtgaaggaagagaaggccagcagatcagtgagagtgcaaccccaccctccacaggaaattgcctcatgggcagggccacagcagagagacacagcatgggcagtgccttccctgcctgtgggggtcatgctgccacttttaatgggtcctccacccaacggggtcagggaggtggtgctgccccagtgggccatgattatcttaaaggcattattctccagccttaagatcttaggacgtttcctttgctatgatttgtacttgcttgagtcccatgactgtttctcttcctctctttcttccttttggaatagtaatatccatcctatgtttgtcccactattgtattttggaagcacataacttgtttggtttcacaggttcacagttaagaaggaattttgcctctgaataaatagaatcttgagtctcatgcaaaaaaaaaaaaaaaaaaaaaaaaa

SEQ ID NO: 291 - DNA, 3832 bp, Homo sapiens
cgcgaggccggcgctgtgctcgcctcggagatcgctgctctttagctgggtgcagaaggcggctccgcggctcgcggacgactggctgggcgcgaatcagattggggggctttctcccggtcccctcccacctcgtctgggctcgcggcgtctccggggaaagccgtggccccgagggcggatccgagaacacacaagtgaaagacacaatgaatggtcatatttctaatcatcccagtagttttggaatgtacccatctcagatgaatggctacggatcatcacctaccttttcccagacggacagagaacatggttcaaaaacaagtgcaaaggccctttatgaacaaaggaagaattatgcacgggacagtgtcagcagtgtgtcagatatatctcaataccgtgttgaacacttgactacctttgtcctggatcggaaagatgctatgatcactgttgatgatggaataaggaaattgaaattgcttgatgccaagggcaaagtgtggactcaagatatgattcttcaagtggatgacagagctgtgagcctgattgatttagaatcaaagaatgaactggagaattttcctttaaacacaatccagcactgccaagctgtgatgcattcatgcagctatgattcagttcttgcactggtgtgcaaagagccaacccagaacaagccagatcttcatctcttccagtgtgatgaggttaaggcaaacctaattagtgaagatattgaaagtgcaatcagtgacagtaaaggagggaaacagaagaggcggcccgacgccctgaggatgatttccaatgcagaccctagtataccgcctccacccagagctcctgcccctgcgccccctgggaccgtcacccaggtggatgttagaagtcgagtggcagcctggtctgcatgggcagccgaccaaggggactttgagaaaccaaggcagtatcatgagcaggaagaaacacctgagatgatggcagcccgcattgacagagatgtgcaaatcttaaaccacattttggatgacattgaattttttatcacaaaactccaaaaagcagcagaagcattttctgagctttctaaaaggaagaaaaacaagaaaggtaaaaggaaaggaccaggagagggtgttttaacgctgcgggcaaaacctccacctcctgatgaatttcttgactgtttccaaaagtttaaacacggatttaaccttctggccaaactgaagtctcatattcagaatcctagtgctgcagatttggttcactttttgtttactccattaaatatggtggtgcaggcaacaggaggtcctgaactagccagttcagtacttagtcccctattgaataaggacacaattgatttcttaaattatactgtcaatggtgatgaacggcagctgtggatgtcattgggaggaacttggatgaaagccagagcagagtggccaaaagaacagtttattccaccatatgttccacgattccgcaatggctgggagcccccaatgctgaactttatgggagccacaatggaacaagatctttatcaactggcagaatctgtggcaaatgtagcagaacatcagcgcaaacaggaaataaaaagattatccacagagcattccagtgtatcagagtatcatccagccgatggctatgcgttcagtagcaacatttacacaagaggatcccacctggaccaaggggaagctgctgttgcttttaagccaacttctaatcgccatatagatagaaattatgaaccactcaaaacacaacccaagaaatatgccaaatccaagtatgactttgtagcaaggaacaacagtgagctctcggttctaaaggatgatattttagagatacttgatgatcggaagcaatggtggaaagttcgaaatgcaagtggagactctggatttgtgccaaataacattttggatattgtgagacctccagaatctggattggggcgtgctgatccaccttatactcatactatacagaaacaaaggatggagtatggcccaagaccagctgatactccccctgctccatcacctcctccaacaccagctcctgttcctgttccccttcccccttccactccagcacctgttcctgtgtcaaaggtcccagcaaatataacacgtcaaaacagcagctccagtgacagtggtggcagtatcgtgcgagacagccagagacacaaacaacttccggtggaccgaaggaaatctcagatggaggaagtgcaagatgaactcatccacagactgaccattggtcggagtgccgctcagaagaaattccatgtgccacggcagaacgtgccagttatcaatatcacttacgactccacaccagaggatgtgaagacgtggttacagtcaaagggattcaaccctgtgactgtcaatagtcttggagtattaaatggtgcacaacttttctctctcaataaggatgaactgaggacagtctgccctgaaggggcgagagtctatagccaaatcactgtacaaaaagctgcattggaggatagcagtggcagctccgagttacaagaaattatgagaagacgacaggaaaaaatcagtgctgccgctagtgattcaggagtggaatcttttgatgaaggaagcagtcactaatttgtttgtttgtatttaaactccattgtttttggcattattccaacatgctttgttttaagaagccttgaagggaatgtcagattcatttttcttgatgtaatttatcaccataaaaaaaaaacccatgcaaacctgagtgagcacaggatttgcttctaggcccattatttttattaaaactgaaaaaatttaaactgaattttttgaccttggaaaatatttttcttactttaccaaggtgaagtttccttaattagactaattattttatccccatcccagggtataaacaggaattgttttgatagtggtggagttattcactgcaacaaagcaacaatgttgtccatgattcaaaatctaagcagtttcgattttgcctgtgaatatggtgtctgtcattcagggcatagctcactgtaggctagcctctgcttacttaagtctcttctctgacatactcaatggaagaatatttagatttatttaaagttcttaatgccaacagtttaaaaaaaaattaaaacatttgaatgaactgtaaagtacagccataccttggacatgcaaatataaatctatggagcattctcaagacagtttgtcatggctctgttgattgcaactccttgtatagcttgtattttgatttagtttatattctgcttattatgtatactgtgttcttatatatgagaaagcacaaatgcgaaagaggtcatgtcttctcaaaatctagcaaaggaagtagtctgcattggtgtgcattacagtattttgcttaatgaaagcctcagttctgaatgttgatatgagtagttaaaaggaagtggggccattttatgtgtttatctgtgtcaagtatttctggtaataagaagcacttaatttacacatattttaatcctgtgaaagattccacatagagaaaagaaagatacctaaccttcaacaaatgttatttttggaaacacaatttttgtcattaaatgttatattatttcacatatataaaacagatgttatgtaagaatgttgtatattttaacataaatcatttagagaaattatctagattcattaattttcatagtgcctttttcacatgagtcagctggaaagtctgcaataaacagtatttgctgtctgtt

SEQ ID NO: 292 - DNA, 3901 bp, Homo sapiens
cagtttgcaaaagccagaggtgcaagaagcagcgactgcagcagcagcagcagcagcggcggtggcagcagcagcagcagcggcggcagcagcagcagcagcggaggcaccggtggcagcagcagcatcaccagcaacaacaacaaaaaaaaatcctcatcaaatcctcacctaagctttcagtgtatccagatccacatcttcactcaagccaggagagggaaagaggaaaggggggcaggaaaaaaaaaaaacccaacaacttagcggaaacttctcagagaatgctccaaaactcagcagtgcttctggtgctggtgatcagtgcttctgcaacccatgaggcggagcagaatgactctgtgagccccaggaaatcccgagtggcggctcaaaactcagctgaagtggttcgttgcctcaacagtgctctacaggtcggctgcggggcttttgcatgcctggaaaactccacctgtgacacagatgggatgtatgacatctgtaaatccttcttgtacagcgctgctaaatttgacactcagggaaaagcattcgtcaaagagagcttaaaatgcatcgccaacggggtcacctccaaggtcttcctcgccattcggaggtgctccactttccaaaggatgattgctgaggtgcaggaagagtgctacagcaagctgaatgtgtgcagcatcgccaagcggaaccctgaagccatcactgaggtcgtccagctgcccaatcacttctccaacagatactataacagacttgtccgaagcctgctggaatgtgatgaagacacagtcagcacaatcagagacagcctgatggagaaaattgggcctaacatggccagcctcttccacatcctgcagacagaccactgtgcccaaacacacccacgagctgacttcaacaggagacgcaccaatgagccgcagaagctgaaagtcctcctcaggaacctccgaggtgaggaggactctccctcccacatcaaacgcacatcccatgagagtgcataaccagggagaggttattcacaacctcaccaaactagtatcattttaggggtgttgacacaccaattttgagtgtactgtgcctggtttgatttttttaaagtagttcctattttctatcccccttaaagaaaattgcatgaaactaggcttctgtaatcaatatcccaacattctgcaatggcagcattcccaccaacaaaatccatgtgatcattctgcctctcctcaggagaaagtaccctcttttaccaacttcctctgccatgtcttttcccctgctcccctgagaccacccccaaacacaaaacattcatgtaactctccagccattgtaatttgaagatgtggatccctttagaacggttgccccagtagagttagctgataaggaaactttatttaaatgcatgtcttaaatgctcataaagatgttaaatggaattcgtgttatgaatctgtgctggccatggacgaatatgaatgtcacatttgaattcttgatctctaatgagctagtgtcttatggtcttgatcctccaatgtctaattttctttccgacacatttaccaaattgcttgagcctggctgtccaaccagactttgagcctgcatcttcttgcatctaatgaaaaacaaaaagctaacatctttacgtactgtaactgctcagagctttaaaagtatctttaacaattgtcttaaaaccagagaatcttaaggtctaactgtggaatataaatagctgaaaactaatgtactgtacataaattccagaggactctgcttaaacaaagcagtatataataactttattgcatatagatttagttttgtaacttagctttatttttcttttcctgggaatggaataactatctcacttccagatatccacataaatgctccttgtggccttttttataactaagggggtagaagtagttttaattcaacatcaaaacttaagatgggcctgtatgagacaggaaaaaccaacaggtttatctgaaggaccccaggtaagatgttaatctcccagcccacctcaacccagaggctactcttgacttagacctatactgaaagatctctgtcacatccaactggaaattccaggaaccaaaaagagcatccctatgggcttggaccacttacagtgtgataaggcctactatacattaggaagtggtagttctttactcgtcccctttcatcggtgcctggtactctggcaaatgatgatggggtgggagactttccattaaatcaatcaggaatgagtcaatcagcctttaggtctttagtccgggggacttggggctgagagagtataaataaccctgggctgtccagccttaatagacttctcttacattttcgtcctgtagcacgctgcctgccaaagtagtcctggcagctggaccatctctgtaggatcgtaaaaaaatagaaaaaaagaaaaaaaaaagaaagaaagagggaaaaagagctggtggtttgatcatttctgccatgatgtttacaagatggcgaccaccaaagtcaaacgactaacctatctatgaacaacagtagtttctcagggtcactgtccttgaacccaacagtcccttatgagcgtcactgcccaccaaaggtcaatgtcaagagaggaagagagggaggaggggtaggactgcaggggccactccaaactcgcttaggtagaaactattggtgctcgactctcactaggctaaactcaagatttgaccaaatcgagtgatagggatcctggtgggaggagagagggcacatctccagaaaaatgaaaagcaatacaactttaccataaagcctttaaaaccagtaacgtgctgctcaaggaccaagagcaattgcagcagacccagcagcagcagcagcagcacaaacattgctgcctttgtccccacacagcctctaagcgtgctgacatcagattgttaagggcatttttatactcagaactgtcccatccccaggtccccaaacttatggacactgccttagcctcttggaaatcaggtagaccatattctaagttagactcttcccctccctcccacacttcccacccccaggcaaggctgacttctctgaatcagaaaagctattaaagtttgtgtgttgtgtccattttgcaaacccaactaagccaggaccccaatgcgacaagtagttcatgagtattcctagcaaatttctctctttcttcagttcagtagatttccttttttcttttcttttttttttttttttttttttggctgtgacctcttcaaaccgtggtacccccccttttctccccacgatgatatctatatatgtatctacaatacatatatctacacatacagaaagaagcagttctcacatgttgctagttttttgcttctctttcccccaccctactccctccaattccccccttaaacttccaaagcttcgtcttgtgtttgctgcagagtgattcgggggctgacctagaccagtttgcatgattcttctcttgtgatttggttgcactttagacatttttgtgccattatatttgcattatgtatttataatttaaatgatatttaggtttttggctgagtactggaataaacagtgagcatatctggtatatgtcattatttattgttaaattacattttttaagctccatgtgcatataaaggttatgaaacatatcatggtaatgacagatgcaagttattttatttgcttattttttataattaaagatgccatagcataatatgaagcctttggtgaattccttctaagataaaaataataataaagtgttacgttttattggtttcaaaaaaaaaaaaaaaaaaaa

SEQ ID NO: 293 - DNA, 2753 bp, Homo sapiens
gtcgggggcagcagcaagatgcgaagcgagccgtacagatcccgggctctccgaacgcaacttcgccctgcttgagcgaggctgcggtttccgaggccctctccagccaaggaaaagctacacaaaaagcctggatcactcatcgaaccacccctgaagccagtgaaggctctctcgcctcgccctctagcgttcgtctggagtagcgccaccccggcttcctggggacacagggttggcaccatggggcccaccagcgtcccgctggtcaaggcccaccgcagctcggtctctgactacgtcaactatgatatcatcgtccggcattacaactacacgggaaagctgaatatcagcgcggacaaggagaacagcattaaactgacctcggtggtgttcattctcatctgctgctttatcatcctggagaacatctttgtcttgctgaccatttggaaaaccaagaaattccaccgacccatgtactattttattggcaatctggccctctcagacctgttggcaggagtagcctacacagctaacctgctcttgtctggggccaccacctacaagctcactcccgcccagtggtttctgcgggaagggagtatgtttgtggccctgtcagcctccgtgttcagtctcctcgccatcgccattgagcgctatatcacaatgctgaaaatgaaactccacaacgggagcaataacttccgcctcttcctgctaatcagcgcctgctgggtcatctccctcatcctgggtggcctgcctatcatgggctggaactgcatcagtgcgctgtccagctgctccaccgtgctgccgctctaccacaagcactatatcctcttctgcaccacggtcttcactctgcttctgctctccatcgtcattctgtactgcagaatctactccttggtcaggactcggagccgccgcctgacgttccgcaagaacatttccaaggccagccgcagctctgagaagtcgctggcgctgctcaagaccgtaattatcgtcctgagcgtcttcatcgcctgctgggcaccgctcttcatcctgctcctgctggatgtgggctgcaaggtgaagacctgtgacatcctcttcagagcggagtacttcctggtgttagctgtgctcaactccggcaccaaccccatcatttacactctgaccaacaaggagatgcgtcgggccttcatccggatcatgtcctgctgcaagtgcccgagcggagactctgctggcaaattcaagcgacccatcatcgccggcatggaattcagccgcagcaaatcggacaattcctcccacccccagaaagacgaaggggacaacccagagaccattatgtcttctggaaacgtcaactcttcttcctagaactggaagctgtccacccaccggaagcgctctttacttggtcgctggccaccccagtgtttggaaaaaaatctctgggcttcgactgctgccagggaggagctgctgcaagccagagggaggaagggggagaatacgaacagcctggtggtgtcgggtgttggtgggtagagttagttcctgtgaacaatgcactgggaagggtggagatcaggtcccggcctggaatatatattctacccccctggagctttgattttgcactgagccaaaggtctagcattgtcaagctcctaaagggttcatttggcccctcctcaaagactaatgtccccatgtgaaagcgtctctttgtctggagctttgaggagatgttttccttcactttagtttcaaacccaagtgagtgtgtgcacttctgcttctttagggatgccctgtacatcccacaccccaccctcccttcccttcatacccctcctcaacgttcttttactttatactttaactacctgagagttatcagagctggggttgtggaatgatcgatcatctatagcaaataggctatgttgagtacgtaggctgtgggaagatgaagatggtttggaggtgtaaaacaatgtccttcgctgaggccaaagtttccatgtaagcgggatccgttttttggaatttggttgaagtcactttgatttctttaaaaaacatcttttcaatgaaatgtgttaccatttcatatccattgaagccgaaatctgcataaggaagcccactttatctaaatgatattagccaggatccttggtgtcctaggagaaacagacaagcaaaacaaagtgaaaaccgaatggattaacttttgcaaaccaagggagatttcttagcaaatgagtctaacaaatatgacatccgtctttcccacttttgttgatgtttatttcagaatcttgtgtgattcatttcaagcaacaacatgttgtattttgttgtgttaaaagtacttttcttgatttttgaatgtatttgtttcaggaagaagtcattttatggatttttctaacccgtgttaacttttctagaatccaccctcttgtgcccttaagcattactttaactggtagggaacgccagaacttttaagtccagctattcattagatagtaattgaagatatgtataaatattacaaagaataaaaatatattactgtctctttagtatggttttcagtgcaattaaaccgagagatgtcttgtttttttaaaaagaatagtatttaataggtttctgacttttgtggatcattttgcacatagctttatcaacttttaaacattaataaactgatttttttaaag

SEQ ID NO: 294 - DNA, 1833 bp, Homo sapiens
ggcacgaggggagaataaaataatcaggaggctgggtttgtgcttggctccaagcatgccctgctctctgacctggagactaccacctcgcacatgccaaggtcaggggctcccaaagagcgccctgcggagcctctcacccctcccccatcctatggccaccagccacagacagggtctggggagtcttcaggagcctcgggggacaaggaccacctgtacagcacggtatgcaagcctcggtccccaaagcctgcagccccggcggcccctccattctcctcttccagcggtgtcttgggtaccgggctctgtgagctagatcggttgcttcaggaacttaatgccactcagttcaacatcacagatgaaatcatgtctcagttcccatctagcaaggtggcttcaggagagcagaaggaggaccagtctgaagataagaaaagacccagcctcccttccagcccgtctcctggcctcccaaaggcttctgccacctcagccactctggagctggatagactgatggcctcactctctgacttccgcgttcaaaaccatcttccagcctctgggccaactcagccaccggtggtgagctccacaaatgagggctccccatccccaccagagccgactggcaagggcagcctagacaccatgctggggctgctgcagtccgacctcagccgccggggtgttcccacccaggccaaaggcctctgtggctcctgcaataaacctattgctgggcaagtggtgacggctctgggccgcgcctggcaccccgagcacttcgtttgcggaggctgttccaccgccctgggaggcagcagcttcttcgagaaggatggagcccccttctgccccgagtgctactttgagcgcttctcgccaagatgtggcttctgcaaccagcccatccgacacaagatggtgaccgccttgggcactcactggcacccagagcatttctgctgcgtcagttgcggggagcccttcggagatgagggtttccacgagcgcgagggccgcccctactgccgccgggacttcctgcagctgttcgccccgcgctgccagggctgccagggccccatcctggataactacatctcggcgctcagcgcgctctggcacccggactgtttcgtctgcagggaatgcttcgcgcccttctcgggaggcagctttttcgagcacgagggccgcccgttgtgcgagaaccacttccacgcacgacgcggctcgctgtgcgccacgtgtggcctccctgtgaccggccgctgcgtgtcggccctgggtcgccgcttccacccggaccacttcacatgcaccttctgcctgcgcccgctcaccaaggggtccttccaggagcgcgccggcaagccctactgccagccctgcttcctgaagctcttcggctgacagcccgctcggctcgccctctcccccggaggccgcgccctcccggaaaagccgggtcctccagaccccgaggccttgctctcagagcgggaggccccacccactggagagccccgcccctaaggtactatgagttctcaggggtcaagttcagaaacggcccagccagacctaaacccacacgcccacaaagtggattgcacacagacaagaactcccgtgcgggcctccactctattcccacccttgagggagcccccttactgggggagggtccttgcaattccagcgaatcggaggccaggccaggacgtccttgctccctgcaccctcactgttctgtgcactttttctacctacataaacacacgcattccacctctaaaaaaaaaaaaaaaaaaaaaa

SEQ ID NO: 295 - DNA, 5316 bp, Homo sapiens
atcatggcggatggccccaggtgtaagcgcagaaagcaggcgaacccgcggcgcaataacgttacaaattataatactgtggtagaaacaaattcagattcagatgatgaagacaaactgcatattgtggaagaagaaagtgttacagatgcagctgactgtgaaggtgtaccagaggatgacctgccaacagaccagacagtgttaccagggaggagcagtgaaagagaagggaatgctaagaactgctgggaggatgacagaaaggaagggcaagaaatcctggggcctgaagctcaggcagatgaagcaggatgtacagtaaaagatgatgaatgcgagtcagatgcagaaaatgagcaaaaccatgatcctaatgttgaagagtttctacaacaacaagacactgctgtcatttttcctgaggcacctgaagaggaccagaggcagggcacaccagaagccagtggtcatgatgaaaatggaacaccagatgcattttcacaattactcacctgtccatattgtgatagaggctataaacgctttacctctctgaaagaacacattaaatatcgtcatgaaaagaatgaagataactttagttgctccctgtgcagttacacctttgcatacagaacccaacttgaacgtcacatgacatcacataaatcaggaagagatcaaagacatgtgacgcagtctgggtgtaatcgtaaattcaaatgcactgagtgtggaaaagctttcaaatacaaacatcacctaaaagagcacttaagaattcacagtggagagaagccatatgaatgcccaaactgcaagaaacgcttttcccattctggctcctatagctcacacataagcagtaagaaatgtatcagcttgatacctgtgaatgggcgaccaagaacaggactcaagacatctcagtgttcttcaccgtctctttcagcatcaccaggcagtcccacacgaccacagatacggcaaaagatagagaataaaccccttcaagaacaactttctgttaaccaaattaaaactgaacctgtggattatgaattcaaacccatagtggttgcttcaggaatcaactgttcaacccctttacaaaatggggttttcactggtggtggcccattacaggcaaccagttctcctcagggcatggtgcaagctgttgttctgccaacagttggtttggtgtctcccataagtatcaatttaagtgatattcagaatgtacttaaagtggcggtagatggtaatgtaataaggcaagtgttggagaataatcaagccaatcttgcatccaaagaacaagaaacaatcaatgcttcacccatacaacaaggtggccattctgttatttcagccatcagtcttcctttggttgatcaagatggaacaaccaaaattatcatcaactacagtcttgagcagcctagccaacttcaagttgttcctcaaaatttaaaaaaagaaaatccagtcgctacaaacagttgtaaaagtgaaaagttaccagaagatcttactgttaagtctgagaaggacaaaagctttgaagggggggtgaatgatagcacttgtcttctgtgtgatgattgtccaggagatattaatgcacttccagaattaaagcactatgacctaaagcagcctactcagcctcctccactccctgcagcagaagctgagaagcctgagtcctctgtttcatcagctactggagatggcaatttgtctcctagtcagccacctttaaagaacctcttgtctctcctaaaagcatattatgctttgaatgcacaaccaagtgcagaagagctctcaaaaattgctgattcagtaaacctaccactggatgtagtaaaaaagtggtttgaaaagatgcaagctggacagatttcagtgcagtcttctgaaccatcttctcctgaaccaggcaaagtaaatatccctgccaagaacaatgatcagcctcaatctgcaaatgcaaatgaaccccaggacagcacagtaaatctacaaagtcctttgaagatgactaactccccagttttaccagtgggatcaaccaccaatggttccagaagtagtacaccatccccatcacctctaaacctttcctcatccagaaatacacagggttacttgtacacagctgagggtgcacaagaagagccacaagtagaacctcttgatctttcactaccaaagcaacagggagaattattagaaaggtcaactatcactagtgtttaccagaacagtgtttattctgtccaggaagaacccttgaacttgtcttgcgcaaaaaaggagccacaaaaggacagttgtgttacagactcagaaccagttgtaaatgtaatcccaccaagtgccaaccccataaatatcgctatacctacagtcactgcccagttacccacaatcgtggccattgctgaccagaacagtgttccatgcttaagagcgctagctgccaataagcaaacgattctgattccccaggtggcatacacctactcaactacggtcagccctgcagtccaagaaccacccttgaaagtgatccagccaaatggaaatcaggatgaaagacaagatactagctcagaaggagtatcaaatgtagaggatcagaatgactctgattctacaccgcccaaaaagaaaatgcggaagacagaaaatggaatgtatgcttgtgatttgtgtgacaagatattccaaaagagtagttcattattgagacataaatatgaacacacaggtaaaagacctcatgagtgtggaatctgtaaaaaggcatttaaacacaaacatcatttgattgaacacatgcgattacattctggagaaaagccctatcaatgtgacaaatgtggaaagcgcttctcacactctgggtcttattctcaacacatgaatcatcgctactcctactgtaagagagaagcggaagaacgtgacagcacagagcaggaagaggcagggcctgaaatcctctcgaatgagcacgtgggtgccagggcgtctccctcacagggcgactcggacgagagagagagtttgacaagggaagaggatgaagacagtgaaaaagaggaagaggaggaggataaagagatggaagaattgcaggaagaaaaagaatgtgaaaaaccacaaggggatgaggaagaggaggaggaggaggaagaagtggaagaagaagaggtagaagaggcagagaatgagggagaagaagcaaaaactgaaggtctgatgaaggatgacagggctgaaagtcaagcaagcagcttaggacaaaaagtaggcgagagtagtgagcaagtgtctgaagaaaagacaaatgaagcctaatcgtttttctagaaggaaaataaattctaattgataatgaatttcgttcaatattatccttgcttttcatggaaacacagtaacctgtatgctgtgattcctgttcactactgtgtgtgtgtgcgcgtgcattgattactatccatttctttagtcaacgctctccacttcctgatttctgctttaaggaaaactgtgaactttctgcttcatgtatcagttttaaagcatcccaggcaaagatcatctacagattctaggaattctctcccctgaaatcaaaacctggagacttttttttcttattttagttgagaagttcataaactgctcaaggattagttttccaggactctgcggaggaacggcaggaagaacctcagagagggcagaggtgacttcaaagtgctggggactccgtcctgagggtcacttggccctgagcccctgcgtgcccttgcggaagcccagaagcttcttcctgctgcacctcccgtttccgctgctgctgacgtttatgcatttcatgatggggtccaacaagaacacctgacttgggtgaagttgtgcaatattggaggctgactgtagggctgggcagctgggagacaggctcatggctcatggctcatggctcagggcggtgcctgccctgggccgggacccccctccccaccccccacctaggctttttgggttttgttcaaggaaggtaaagtgagaggtttaggtcagtgtttttaagtttttgttttttttttaaagcaaatcctgtatatgtatctacatgggagataggtagacactacttatttgttacattttgtactatacgtttgtgttccaggtttcagcttccctcgctcctgttgttaagaagcgtccctgtcagcacaggtgtgcattgaggaaggggccccagggccttcgctccctcagcactggggtggaggcggcaggaaggggcggcccttacctggcaggtctgggcgcacctttagcaggtggactccgtggggctccaccagccagaagcctctggaaggcaacgaaggcaatgctgctccctgagtccagtccccgcccccaaacccagcccaggtgccttcagctacttcggcttcttaaaccctgcagtgttaaacagaggcattgagaaaggggaaaggcgggtatttttaaaagccaaagattgacccaagttacttgagggtagggaggcgggcccagtgcaggaggctgcatccctggcctgctggtgcccaccgggggctgtgcctgtgccgggccgcaggaagctggctgcccccattcctgctgctgctgctgctgctgctctgtggctgtttcaaagactgggcgaaaggctgtccggagggcagaccaggtgccttgccgcagagaaaacaccaaagtctcctgttcgctcataaagaagtttttgggatgggagagaatccagaccatcttggggcagccaggcccttgccttcatttttacagaggtagcacaactgattccaacacaaaaccccttcccctttttaaaatgatttctgttctaatgccatagatcaaaggcctcagaaaccattgtgtgtttcctctttgaagcaatgacaagcactttactttcacggtggtttttgttttttcttattgctgtggaacctcttttggaggacgttaaaggcgtgttttacttgtttttttaagagtgtgtgatgtgtgttttgtagatttcttgacagtgctgtaatacagacggcaatgcaatagcctatttaaagaactacgtgatctgattgagatgtacatagtttttttttttaccataactgaattattttatctcttatgttatcatgagaaatgtatgccaaatgattagttgatgtatgttttttaatttaatatttaaataaaatatttggaagg

SEQ ID NO: 296 - DNA, 1168 bp, Homo sapiens
ggcacgaggccccagccagctgtcccgagtctggactttccctctgcccctccccactctcaggctggtggggtggggaaagcagcccattcctgggctcagagactcccaccccagctcagagggagcaggggcccagccagggacggaccctcattcctcccagggaccccagacctctgtctctctcgggccttggctccttgaacttttggccgccatgtgcttcccgaaggtcctctctgatgacatgaagaagctgaaggcccgaatggtaatgctcctccctacttctgctcaggggttgggggcctgggtctcagcgtgtgacactgaggacactgtgggacacctgggaccctggagggacaaggatccggccctttggtgccaactctgcctctcttcacagcaccaggccatagaaagattttatgataaaatgcaaaatgcagaatcaggacgtggacaggtgatgtcgagcctggcagagctggaggacgacttcaaagagggctacctggagacagtggcggcttattatgaggagcagcacccagagctcactcctctacttgaaaaagaaagagatggattacggtgccgaggcaacagatcccctgtcccggatgttgaggatcccgcaaccgaggagcctggggagagcttttgtgacaaggtcatgagatggttccaggccatgctgcagcggctgcagacctggtggcacggggttctggcctgggtgaaggagaaggtggtggccctggtccatgcagtgcaggccctctggaaacagttccagagtttctgctgctctctgtcagagctcttcatgtcctctttccagtcctacggagccccacggggggacaaggaggagctgacaccccagaagtgctctgaaccccaatcctcaaaatgaagatactgacaccacctttgccctccccgtcaccgcgcacccaccctgacccctccctcagctgtcctgtgccccgccctctcccgcacactcagtccccctgcctggcgttcctgccgcagctctgacctggtgctgtcgccctggcatcttaataaaacctgcttatacttccctggcaggggagataccctgaaaaaaaaaaaaaaaaaaaaaaaaaaaaaaaaaaaaaaaaaaaaaaaa

SEQ ID NO: 297 - DNA, 5598 bp, Homo sapiens
ggcccctcagccctgctgcccagcacgagcctgtgctcgccctgcccaacgcagacagccagacccagggcggcccctctggcggctctgctcctcccgaaggatgcttggggagtgaggcgaagctgggcgctcctctcccctacagcagcccccttcctccatccctctgttctcctgagccttcaggagcctgcaccagtcctgcctgtccttctactcagctgttacccactctgggaccagcagtctttctgataactgggagagggcagtaaggaggacttcctggagggggtgactgtccagagcctggaactgtgcccacaccagaagccatcagcagcaaggacaccatgcggcttccgggtgcgatgccagctctggccctcaaaggcgagctgctgttgctgtctctcctgttacttctggaaccacagatctctcagggcctggtcgtcacacccccggggccagagcttgtcctcaatgtctccagcaccttcgttctgacctgctcgggttcagctccggtggtgtgggaacggatgtcccaggagcccccacaggaaatggccaaggcccaggatggcaccttctccagcgtgctcacactgaccaacctcactgggctagacacgggagaatacttttgcacccacaatgactcccgtggactggagaccgatgagcggaaacggctctacatctttgtgccagatcccaccgtgggcttcctccctaatgatgccgaggaactattcatctttctcacggaaataactgagatcaccattccatgccgagtaacagacccacagctggtggtgacactgcacgagaagaaaggggacgttgcactgcctgtcccctatgatcaccaacgtggcttttctggtatctttgaggacagaagctacatctgcaaaaccaccattggggacagggaggtggattctgatgcctactatgtctacagactccaggtgtcatccatcaacgtctctgtgaacgcagtgcagactgtggtccgccagggtgagaacatcaccctcatgtgcattgtgatcgggaatgaggtggtcaacttcgagtggacatacccccgcaaagaaagtgggcggctggtggagccggtgactgacttcctcttggatatgccttaccacatccgctccatcctgcacatccccagtgccgagttagaagactcggggacctacacctgcaatgtgacggagagtgtgaatgaccatcaggatgaaaaggccatcaacatcaccgtggttgagagcggctacgtgcggctcctgggagaggtgggcacactacaatttgctgagctgcatcggagccggacactgcaggtagtgttcgaggcctacccaccgcccactgtcctgtggttcaaagacaaccgcaccctgggcgactccagcgctggcgaaatcgccctgtccacgcgcaacgtgtcggagacccggtatgtgtcagagctgacactggttcgcgtgaaggtggcagaggctggccactacaccatgcgggccttccatgaggatgctgaggtccagctctccttccagctacagatcaatgtccctgtccgagtgctggagctaagtgagagccaccctgacagtggggaacagacagtccgctgtcgtggccggggcatgccccagccgaacatcatctggtctgcctgcagagacctcaaaaggtgtccacgtgagctgccgcccacgctgctggggaacagttccgaagaggagagccagctggagactaacgtgacgtactgggaggaggagcaggagtttgaggtggtgagcacactgcgtctgcagcacgtggatcggccactgtcggtgcgctgcacgctgcgcaacgctgtgggccaggacacgcaggaggtcatcgtggtgccacactccttgccctttaaggtggtggtgatctcagccatcctggccctggtggtgctcaccatcatctcccttatcatcctcatcatgctttggcagaagaagccacgttacgagatccgatggaaggtgattgagtctgtgagctctgacggccatgagtacatctacgtggaccccatgcagctgccctatgactccacgtgggagctgccgcgggaccagcttgtgctgggacgcaccctcggctctggggcctttgggcaggtggtggaggccacggctcatggcctgagccattctcaggccacgatgaaagtggccgtcaagatgcttaaatccacagcccgcagcagtgagaagcaagcccttatgtcggagctgaagatcatgagtcaccttgggccccacctgaacgtggtcaacctgttgggggcctgcaccaaaggaggacccatctatatcatcactgagtactgccgctacggagacctggtggactacctgcaccgcaacaaacacaccttcctgcagcaccactccgacaagcgccgcccgcccagcgcggagctctacagcaatgctctgcccgttgggctccccctgcccagccatgtgtccttgaccggggagagcgacggtggctacatggacatgagcaaggacgagtcggtggactatgtgcccatgctggacatgaaaggagacgtcaaatatgcagacatcgagtcctccaactacatggccccttacgataactacgttccctctgcccctgagaggacctgccgagcaactttgatcaacgagtctccagtgctaagctacatggacctcgtgggcttcagctaccaggtggccaatggcatggagtttctggcctccaagaactgcgtccacagagacctggcggctaggaacgtgctcatctgtgaaggcaagctggtcaagatctgtgactttggcctggctcgagacatcatgcgggactcgaattacatctccaaaggcagcacctttttgcctttaaagtggatggctccggagagcatcttcaacagcctctacaccaccctgagcgacgtgtggtccttcgggatcctgctctgggagatcttcaccttgggtggcaccccttacccagagctgcccatgaacgagcagttctacaatgccatcaaacggggttaccgcatggcccagcctgcccatgcctccgacgagatctatgagatcatgcagaagtgctgggaagagaagtttgagattcggccccccttctcccagctggtgctgcttctcgagagactgttgggcgaaggttacaaaaagaagtaccagcaggtggatgaggagtttctgaggagtgaccacccagccatccttcggtcccaggcccgcttgcctgggttccatggcctccgatctcccctggacaccagctccgtcctctatactgccgtgcagcccaatgagggtgacaacgactatatcatccccctgcctgaccccaaacccgaggttgctgacgagggcccactggagggttcccccagcctagccagctccaccctgaatgaagtcaacacctcctcaaccatctcctgtgacagccccctggagccccaggacgaaccagagccagagccccagcttgagctccaggtggagccggagccagagctggaacagttgccggattcggggtgccctgcgcctcgggcggaagcagaggatagcttcctgtagggggctggcccctaccctgccctgcctgaagctccccccctgccagcacccagcatctcctggcctggcctgaccgggcttcctgtcagccaggctgcccttatcagctgtccccttctggaagctttctgctcctgacgtgttgtgccccaaaccctggggctggcttaggaggcaagaaaactgcaggggccgtgaccagccctctgcctccagggaggccaactgactctgagccagggttcccccagggaactcagttttcccatatgtaagatgggaaagttaggcttgatgacccagaatctaggattctctccctggctgacaggtggggagaccgaatccctccctgggaagattcttggagttactgaggtggtaaattaacttttttctgttcagccagctacccctcaaggaatcatagctctctcctcgcactttttatccacccaggagctagggaagagaccctagcctccctggctgctggctgagctagggcctagccttgagcagtgttgcctcatccagaagaaagccagtctcctccctatgatgccagtccctgcgttccctggcccgagctggtctggggccattaggcagcctaattaatgctggaggctgagccaagtacaggacacccccagcctgcagcccttgcccagggcacttggagcacacgcagccatagcaagtgcctgtgtccctgtccttcaggcccatcagtcctggggctttttctttatcaccctcagtcttaatccatccaccagagtctagaaggccagacgggccccgcatctgtgatgagaatgtaaatgtgccagtgtggagtggccacgtgtgtgtgccagtatatggccctggctctgcattggacctgctatgaggctttggaggaatccctcaccctctctgggcctcagtttccccttcaaaaaatgaataagtcggacttattaactctgagtgccttgccagcactaacattctagagtattccaggtggttgcacatttgtccagatgaagcaaggccatataccctaaacttccatcctgggggtcagctgggctcctgggagattccagatcacacatcacactctggggactcaggaaccatgccccttccccaggcccccagcaagtctcaagaacacagctgcacaggccttgacttagagtgacagccggtgtcctggaaagccccaagcagctgccccagggacatgggaagaccacgggacctctttcactacccacgatgacctccgggggtatcctgggcaaaagggacaaagagggcaaatgagatcacctcctgcagcccaccactccagcacctgtgccgaggtctgcgtcgaagacagaatggacagtgaggacagttatgtcttgtaaaagacaagaagcttcagatggtaccccaagaaggatgtgagaggtggccgcttggagtttgcccctcacccaccagctgccccatccctgaggcagcgctccatgggggtatggttttgtcactgcccagacctagcagtgacatctcattgtccccagcccagtgggcattggaggtgccaggggagtcagggttgtagccaagacgcccccgcacggggagggttgggaagggggtgcaggaagctcaacccctctgggcaccaaccctgcattgcaggttggcaccttacttccctgggatccccagagttggtccaaggagggagagtgggttctcaatacggtaccaaagatataatcacctaggtttacaaatatttttaggactcacgttaactcacatttatacagcagaaatgctattttgtatgctgttaagtttttctatctgtgtacttttttttaagggaaagattttaatattaaacctggtgcttctcactcac

SEQ ID NO: 298 - DNA, 979 bp, Homo sapiens
cttacagaactcccacggacacaccatgataaggacgctgctgctgtccactttggtggctggagccctcagttgtggggaccccacttacccaccttatgtgactagggtggttggcggtgaagaagcgaggcccaacagctggccctggcaggtctccctgcagtacagctccaatggcaagtggtaccacacctgcggagggtccctgatagccaacagctgggtcctgacggctgcccactgcatcagctcctccaggacctaccgcgtggggctgggccggcacaacctctacgttgcggagtccggctcgctggcagtcagtgtctctaagattgtggtgcacaaggactggaactccaaccaaatctccaaagggaacgacattgccctgctcaaactggctaaccccgtctccctcaccgacaagatccagctggcctgcctccctcctgccggcaccattctacccaacaactacccctgctacgtcacgggctggggaaggctgcagaccaacggggctgttcctgatgtcctgcagcagggccggttgctggttgtggactatgccacctgctccagctctgcctggtggggcagcagcgtgaaaaccagtatgatctgtgctgggggtgatggcgtgatctccagctgcaacggagactctggcgggccactgaactgtcaggcgtctgacggccggtggcaggtgcacggcatcgtcagcttcgggtctcgcctcggctgcaactactaccacaagccctccgtcttcacgcgggtctccaattacatcgactggatcaattcggtgattgcaaataactaaccaaaagaagtccctgggactgtttcagacttggaaaggtcacagaaggaaaataatataataaagtgacaactatgcaaaaaaaaaaaaaaaaaaaaaaaaaaaaaaaaaaataaaaaaaaaaaaaaaaaaaaaaaaaaaaaa

SEQ ID NO: 299 - DNA, 4666 bp, Homo sapiens
cgagactcagccagaggagtacggattaaggggccgaagaaagaggagtgaggcaggggagcgaggcggacgctccgagcgcatcggactcacctgggccggcggcgagcggcgagtacgagtggactcttgccctccgcagcatgcgccccgcctgctaagtcgccgccgtctcgccctcacctagcaccgccaatcccgcctggatggagtcccctctagggttcccattggctcctgtgagtgcttgggtgttcgggagcctgtttttggcggaggggaaccaacttttgaagttcgcccagaagactgcgttccagccccagttccccggcagcgggacccggcgaagacgcgaccgcggcgcgagtcaccatgggaagcaaaggtgtctaccagtaccactggcaaagccacaatgtcaagcacagtggtgtggacgacatggtgctactgtccaagatcacagagaactccatcgtggagaatctgaagaagagatacatggatgactacatttttacatatataggatctgtattaatctcagtcaaccctttcaagcagatgccatattttggggaaaaggaaattgaaatgtaccaaggagcggcacagtatgaaaacccaccacatatctatgcccttgcagataatatgtacagaaacatgatcattgacagagagaaccagtgcgtcattatcagtggtgaaagtggtgctggaaaaacagtggctgccaaatatatcatgagctacatctccagagtgtctggaggagggaccaaagtccagcacgtgaaggacattatcctgcagtccaacccgctgctggaggccttcgggaacgccaagaccgtccggaacaacaactccagccgatttggaaaatactttgaaatccagttcagtccaggtggggaaccagatggtggaaagatctccaacttccttctggaaaaatctagggtggtgatgaggaacccaggagagcggagttttcacatattttaccagctcatcgagggcgcctctgcagagcagaaacacagccttggcatcaccagcatggactattattactacctgagcctctcgggctcatacaaggttgatgacattgacgacaggcgggagtttcaggaaactctgcacgccatgaatgtgattgggatctttgcagaagagcaaacgctggtgttgcagatagtggcgggtattctccacctgggaaacatcagcttcaaagaagttggcaactacgcggctgtggagagtgaagagtttttagcttttcctgcatatctgctagggataaaccaggaccggttgaaagaaaagctaacaagccggcagatggatagcaagtggggaggcaaatccgaatccatccacgtgaccctcaacgtagagcaggcctgttacacccgggatgcgctcgccaaggccctgcacgcccgggtctttgatttcttggtagattccatcaataaagccatggagaaagaccatgaagaatacaacattggcgtcctagacatctatggctttgaaatattccagaaaaatggctttgaacagttttgtatcaattttgttaatgaaaaactgcagcagatttttattgaactgacattaaaggcagaacaggaagaatatgttcaagagggaataagatggacacccattgagtactttaataataaaatcgtatgtgacctcatagagaacaaagtgaaccctcctggcatcatgagcatcctggatgacgtgtgcgccacgatgcatgcggtgggtgagggggcagatcagacgctgctccagaaacttcagatgcagattgggagtcatgagcacttcaacagttggaaccaaggcttcatcattcatcattatgctgggaaggtatcctatgacatggatggcttttgtgaaaggaaccgggatgtgctttttatggatctcatcgagcttatgcagagcagcgagctgcctttcataaagtctttatttccggaaaatctgcaggctgacaagaaagggcgcccaactactgccggaagcaaaataaagaaacaagccaatgaccttgtgagcaccctgatgaaatgtacgccccactacattcgctgcatcaagccaaacgaaaccaagaagcccagagactgggaggaaagcagggtaaagcatcaagtcgaatatttgggtctgaaagagaacattcgagtgagaagagctggctatgcctatcggcgcatcttccaaaaattcctacagaggtatgccattctgaccaaagccacctggccttcttggcagggagaggagaagcaaggcgtcctgcacctgctgcagtcggtcaacatggacagcgaccagttccagctggggaggagtaaagtgttcatcaaagcccccgagtctctatttcttttagaagagatgagagagagaaagtatgatgggtatgctcgagtgatacagaaatcatggaggaaattcgtggcccggaagaaatacgttcaaatgagagaagaagcctcagacctcttattgaacaagaaggagagaaggagaaacagtattaacaggaactttataggggattatattgggatggaagagcacccagaactccagcagttcgtgggcaagagggagaagattgatttcgcagacacagtcaccaagtatgacaggaggttcaagggtgtaaagcgagacctgctccttaccccaaagtgcttgtacttaatcggacgagaaaaagtcaaacagggcccagacaagggcctggtgaaagaagtcctgaagcggaaaatcgagatagaacggatcttgtctgtgtccctcagtactatgcaggatgacatttttattctccatgagcaagagtatgacagtttgcttgaatctgtcttcaaaactgaattcctaagcctcttagcaaagcgttacgaggagaagacccagaagcaactacctctgaaattcagcaatacgcttgaactgaagttgaaaaaggaaaactggggccctggagtgcagggtgcgggctcccggcaagtgcagttccaccaagggtttggggacctggctgtcctcaagcccagtaacaaagtgctgcaggtcagcatcggacctggactgcccaagaactcccgtcctaccagaaggaacactacccaaaatacaggttattccagtgggactcaaaatgccaactacccagtgagagctgcccctcctcccccaggataccatcagaacggagtcatcagaaaccagtatgtgccatatccccatgctcctggaagccagaggtccattcagaaaagcctgtacacctccatggcccgcccgcccttgcctcggcagcagtctaccagttcagaccgagtgtcacagacgccagagagcctggatttcctcaaggtcccggaccagggagctgcaggggtcaggagacaaacaaccagtcggcctcccccagctgggggcagacccaagccccagcccaagcccaagcctcaggttccacagtgcaaggctttgtatgcctatgacgctcaggacacagacgaactcagctttaatgccaatgacattattgatattatcaaagaagatccttctggctggtggacgggtcgactacgaggcaagccagggctgttccccaacaactatgtgaccaagatctgaggtgcccgtgactctgacacatggggcagaggagctccaggcacagaccaggtgaggggatatttaggtgctccccttacaatccacaatgagcaattgcttctccaaggcctggagctattctggtaccttccccatggaggacactgaaaaggctgggttggggacagggagtatcactccataagtgatcctaaaaggtagcctcttcataggaaccaggaggacaaaaccaccatgcattaagatttatttattgtatttaaacctggtgagaggacaagtgaggtctgctcagaccttgtaggcttctatcaaaacagcaccctgcttgctcaccaggcctagagaatggctgtaggtggcggctgagaagtgcctttagttgaagagcacatttctttcatctctcttgtctatacctgatagacacattcctctctgccaccttccttcagggaggacccgccctctgcagactgggcttagcgtgagcaggcacttcccatgtacgtgccaagggtaagctggcctgctgagcccagggcgacagaggggcactggtttacactttgccgggaccatcagggccgccaagcaggtcaggggctgggggctggtcctgctggctttgatttctctgggtcttcaattagaatgtggctgggcccatattggtttgtgttaaatgctgtacttactacaagaatcttttttcaagcatgtacatttataaaaacaggatcatatactgtatatataaaaatcttgagatggtagaaacatgtatgaatgtactaagtagtattccactgtactcattcataaggtaggttttcttacaaaactcacaccaggtacttaaagatgtgctctgcttttttccaactacggagtgtcactgctttctaggtcagtccctgcagactcttctcaactctttccctataggaaacttact

SEQ ID NO: 300 - DNA, 1958 bp, Homo sapiens
agcagccggcgcggccgccagcgcggtgtagggggcaggcgcggatcccgccaccgccgcgcgctcggcccgccgactcccggcgccgccgccgccactgccgtcgccgccgccgcctgccgggactggagcgcgccgtccgccgcggacaagaccctggcctcaggccggagcagccccatcatgccgagggagcgcagggagcgggatgcgaaggagcgggacaccatgaaggaggacggcggcgcggagttctcggctcgctccaggaagaggaaggcaaacgtgaccgtttttttgcaggatccagatgaagaaatggccaaaatcgacaggacggcgagggaccagtgtgggagccagccttgggacaataatgcagtctgtgcagacccctgctccctgatccccacacctgacaaagaagatgatgaccgggtttacccaaactcaacgtgcaagcctcggattattgcaccatccagaggctccccgctgcctgtactgagctgggcaaatagagaggaagtctggaaaatcatgttaaacaaggaaaagacatacttaagggatcagcactttcttgagcaacaccctcttctgcagccaaaaatgcgagcaattcttctggattggttaatggaggtgtgtgaagtctataaacttcacagggagaccttttacttggcacaagatttctttgaccggtatatggcgacacaagaaaatgttgtaaaaactcttttacagcttattgggatttcatctttatttattgcagccaaacttgaggaaatctatcctccaaagttgcaccagtttgcgtatgtgacagatggagcttgttcaggagatgaaattctcaccatggaattaatgattatgaaggcccttaagtggcgtttaagtcccctgactattgtgtcctggctgaatgtatacatgcaggttgcatatctaaatgacttacatgaagtgctactgccgcagtatccccagcaaatctttatacagattgcagagctgttggatctctgtgtcctggatgttgactgccttgaatttccttatggtatacttgctgcttcggccttgtatcatttctcgtcatctgaattgatgcaaaaggtttcagggtatcagtggtgcgacatagagaactgtgtcaagtggatggttccatttgccatggttataagggagacggggagctcaaaactgaagcacttcaggggcgtcgctgatgaagatgcacacaacatacagacccacagagacagcttggatttgctggacaaagcccgagcaaagaaagccatgttgtctgaacaaaatagggcttctcctctccccagtgggctcctcaccccgccacagagcggtaagaagcagagcagcgggccggaaatggcgtgaccaccccatccttctccaccaaagacagttgcgcgcctgctccacgttctcttctgtctgttgcagcggaggcgtgcgtttgcttttacagatatctgaatggaagagtgtttcttccacaacagaagtatttctgtggatggcatcaaacagggcaaagtgttttttattgaatgcttataggttttttttaaataagtgggtcaagtacaccagccacctccagacaccagtgcgtgctcccgatgctgctatggaaggtgctacttgacctaagggactcccacaacaacaaaagcttgaagctgtggagggccacggtggcgtggctctcctcgcaggtgttctgggctccgttgtaccaagtggagcaggtggttgcgggcaagcgttgtgcagagcccatagccagctgggcagggggctgccctctccacattatcagttgacagtgtacaatgcctttgatgaactgttttgtaagtgctgctatatctatccattttttaataaagataatactgtttttgagacaaaaaaaa

SEQ ID NO: 301 - DNA, 4030 bp, Homo sapiens
ggacatctggtacgaagcactggtcccggcgggagctttgccaagcacatggtagcccagtgtgtctcaccaaagggacctcttgcttgttcgagaacatacctttttggagctactcatgttccttacttgggtggtgacagcaagctgcccaagaaaactgaacaaattaggctattgtcccagatatatgctgctgttattgaggctgttttggctggcattgcatgttatgctaaaacttccagtctaacaaaggccaaggaggtagcagagcaaactctgggatctgggttagattcctttgagttgattccgtttaaggcagccctgcgctccaagatgacttttcatatacatgctgtgaataatcagggaagaattgtaccgctggacagtgaagatagcttatcctttgtgaagacggcttgtatggccgtctatgacattcctgacttactgggaggcaatggttgtttaggatctgtggttttctctgaatcatttttgacttctcagatcttagttaaagaaaaggatggcactgttaccacagaaaccagctccgtagtcctgactgctgctgtacccagattctgctcctggctggtggaagataatgaagtaaaattgtctgagaaaacccagcaagcagtgaggggggatgagtctttcctgggcacttatctaacaggaggagaaggagcatatctttattccagcaatctacagtcctggcctgaggaagggaatgttcatttcttctctagtggccttctgttttctcactgtcgtcatggaagtatcatcatttccaaggatcacatgaattccatttccttctatgatggggattccaccagtactgttgctgctcttctcatagacttcaaaagctcattgcttcctcacctcccagttcatttccatggatcaagcaattttctgatgattgcccttttccccaaatcgaagatataccaagcattttactcagaggtcttctccctctggaaacagcaggataactcagggatctctttaaaagtgatccaggaagatggattatctgtggaacaaaagagattgcactccagtgcacagaagctcttcagtgccctgagccagcctgctggggagaaacggagttccctaaagttactctcagccaaactcccagagctggactggtttctccagcatttcgccatcagcagcattagccaggagcctgtgatgcggacccatcttcctgtgctgctgcagcaagctgaaatcaacactactcacagaatagaaagtgacaaggtaattatcagcattgtaaccggcctcccaggctgtcacgctagcgagctctgtgcttttctggtcactctgcataaggaatgtggcagatggatggtgtatcgccaaatcatggacagctctgaatgttttcatgctgcacacttccagagatacctttccagtgccctagaggcccagcagaaccgctctgcgcgccagtcagcctacatccgcaagaagaccagactgctggtggtgttacaaggctacacagatgttattgatgttgtccaggccctgcagacccacccagactcaaatgtcaaggcctccttcaccattggtgccatcacagcatgtgtggagcccatgagctgctacatggagcacagatttctctttcctaaatgtcttgaccagtgttcacaaggcctggtgagtaacgtggtattcaccagtcacaccacggagcagcggcaccctctccttgttcagctgcagagcctcatcagggctgccaatcctgctgcagccttcattcttgcagaaaatgggattgtcaccaggaatgaagacattgagctgattctctcagaaaacagtttttcaagtcctgagatgctacgatctcgatatttaatgtatcctggctggtatgaaggtaaattgaatgctggatcagtctatcccctaatggttcagatctgcgtatggtttggccgtcccttggagaagactcgctttgtggccaaatgtaaagcaattcagtcctccatcaagccaagtcccttctccggaaacatctaccacatcctgggcaaagtgaagttttcagactctgagaggaccatggaggtctgctacaacacactggccaactccttgagcatcatgccagttttggaaggacccacaccaccaccagactccaaaagcgtatctcaagacagcagcgggcagcaggagtgctaccttgtgttcatcggctgctccctgaaggaagacagcatcaaggactggctgcggcagtcagctaagcagaagcctcagaggaaagccctgaagaccagggggatgctgacgcaacaggagatcaggagcatccacgtaaaacgccacttggaacccctacctgcaggctacttttataatggcacccaatttgttaacttctttggtgacaaaactgattttcacccactcatggaccagttcatgaatgactacgtggaagaagccaaccgggaaattgagaagtataaccaggagctggaacagcaggagtatcatgacctctttgagctgaagccctagaggaaggctgggcccgtacgtcctgcagaatgtccaccttggagatggacgaacgggtgtcttaacctcagctctcctggaggcctctcccttaaggggctgtctttgttctccttggcctgtgtgtgctggcttgagtgcatgttgtctttattccctgtatagcgctgaagagcatcacctgcaccattgattttgggggtcgggggaatactcaaggatgagcagatggggcctgcccgtctacgtgtgcaactggcagtccaggagctctgggtttctgataacaggatctcctttgggctcttgaggttggggagaagcattaggattacacagaggagctactgggacttagaaggaaccctggctgcctgaactgtggccgtgtctgggaggcgaggccacgacaggcctcaagcctcagatgctgctccacgagagccatcttccccagtggagtgcctgcctcccctgctaggcccgtttccctgaaggagctggccgtactggccgtgggcccagtcctgggaggagcagcacagccttgcccaggcccagtccacagagccagcagcttgggttgagatgaatgatgtgttcacaaatgaggggatttcccttctggactaaactgaaggagaggcttgttgctttccagaggtgtgtggctcttaagttgacatcagcttttccccttgtgggtggttctttagctctcctgtcacaccattcgggtgtcctaatgtagggacaagagcaagcctgctgctcaggccccctggcgaggcttcacctcactgtggaagggggcgtcctgcagctggttagtcttaggcctggtggctgatcacttgtggggtcagtctccagcacccagcgctcccacaagccttgccaaggaaggcctgcttttcagccacaaacttcaggaaactcatccccccgctccccaaagtgttgttgctggccctgggcttgtgtggctcctgaggattgggaatttcaaataattgcaatacctgagttagaattccttctaatggcatcgttttaagctggaccataaagcagaggggaattacaagtgtgtcccatgcctgaccttcataattggtgtgggggacaggggagtcacagccactgatatttaggtgatgtctcttaggacttcagtgcctcagctacctgaactgtaaatgttttctgaatttcacatatttttttttgcatgccttaggaagaagcacataggtaaaaccagcagtttccagtaatatagggggtttttgagcaaggcccctggagcagcggagagacaagatggagcacatgtagtcggtgtgcctggtcacacagaggcctgcatgcaagtagcaaagcagctctcaagggcttgtcagtaaaatatattagaaaaaaaaaa

SEQ ID NO: 302 - DNA, 778 bp, Homo sapiens
aattcggcacgggggggaaggcggctaccagtgtaaagccagagctgaggttcttgatagtccacaatgggtgaaccacagcaagtgagtgcacttccaccacctccaatgcaatatatcaaggaatatacggatgaaaatattcaagaaggcttagctcccaagcctccccctccaataaaagacagttacatgatgtttggcaatcagttccaatgtgatgatcttatcatccgccctttggaaagtcagggcatcgaacggcttcatcctatgcagtttgatcacaagaaagaactgagaaaacttaatatgtctatccttattaatttcttggaccttttagatattttaataaggagccctgggagtataaaacgagaagagaaactagaagatcttaagctgctttttgtacacgtgcatcatcttataaatgaataccgaccccaccaagcaagagagaccttgagagtcatgatggaggtccagaaacgtcaacggcttgaaacagctgagagatttcaaaagcacctggaacgagtaattgaaatgattcagaattgcttggcttctttgcctgatgatttgcctcattcagaagcaggaatgagagtaaaaactgaaccaatggatgctgatgatagcaacaattgtactggacagaatgaacatcaaagagaaaattcaggtcataggagagatcagattatagagaaagatgctgccttgtgtgtcctaattgatgagatgaatgaaagaccatgaaagatgtttc

SEQ ID NO: 303 - DNA, 7923 bp, Homo sapiens
gcgcactcgggcacgcgctcggaagtcgggggtcggcgcggagtgcaggctgctcccggggtaggtgagggaagcgcggaggcggggcgcgggggcagtggtcggcgagcagcgcggtcctcgctaggggcgcccacccgtcagtctctccggcgcgagccgccgccaccgcccgcgccggagtcaggcccctgggcccccaggctcaagcagcgaagcggcctccgggggacgccgctaggcgagaggaacgcgccggtgcccttgccttcgccgtgacccagcgtgcgggcggcgggatgagagggagccatcgggccgcgccggccctgcggccccgggggcggctctggcccgtgctggccgtgctggcggcggccgccgcggcgggctgtgcccaggcagccatggacgagtgcacggacgagggcgggcggccgcagcgctgcatgcccgagttcgtcaacgccgctttcaacgtgactgtggtggccaccaacacgtgtgggactccgcccgaggaatactgtgtgcagaccggggtgaccggggtcaccaagtcctgtcacctgtgcgacgccgggcagccccacctgcagcacggggcagccttcctgaccgactacaacaaccaggccgacaccacctggtggcaaagccagaccatgctggccggggtgcagtaccccagctccatcaacctcacgctgcacctgggaaaagcttttgacatcacctatgtgcgtctcaagttccacaccagccgcccggagagctttgccatttacaagcgcacacgggaagacgggccctggattccttaccagtactacagtggttcctgcgagaacacctactccaaggcaaaccgcggcttcatcaggacaggaggggacgagcagcaggccttgtgtactgatgaattcagtgacatttctcccctcactgggggcaacgtggccttttctaccctggaaggaaggcccagcgcctataactttgacaatagccctgtgctgcaggaatgggtaactgccactgacatcagagtaactcttaatcgcctgaacacttttggagatgaagtgtttaacgatcccaaagttctcaagtcctattattatgccatctctgattttgctgtaggtggcagatgtaaatgtaatggacacgcaagcgagtgtatgaagaacgaatttgataagctggtgtgtaattgcaaacataacacatatggagtagactgtgaaaagtgtcttcctttcttcaatgaccggccgtggaggagggcaactgcggaaagtgccagtgaatgcctgccctgtgattgcaatggtcgatcccaggaatgctacttcgaccctgaactctatcgttccactggccatgggggccactgtaccaactgccaggataacacagatggcgcccactgtgagaggtgccgagagaacttcttccgccttggcaacaatgaagcctgctcttcatgccactgtagtcctgtgggctctctaagcacacagtgtgatagttacggcagatgcagctgtaagccaggagtgatgggggacaaatgtgaccgttgccagcctggattccattctctcactgaagcaggatgcaggccatgctcttgtgatccctctggcagcatagatgaatgtaatgttgaaacaggaagatgtgtttgcaaagacaatgtcgaaggcttcaattgtgaaagatgcaaacctggattttttaatctggaatcatctaatcctcggggttgcacaccctgcttctgctttgggcattcttctgtctgtacaaacgctgttggctacagtgtttattctatctcctctacctttcagattgatgaggatgggtggcgtgcggaacagagagatggctctgaagcatctctcgagtggtcctctgagaggcaagatatcgccgtgatctcagacagctactttcctcggtacttcattgctcctgcaaagttcttgggcaagcaggtgttgagttatggtcagaacctctccttctcctttcgagtggacaggcgagatactcgcctctctgccgaagaccttgtgcttgagggagctggcttaagagtatctgtacccttgatcgctcagggcaattcctatccaagtgagaccactgtgaagtatgtcttcaggctccatgaagcaacagattacccttggaggcctgctcttaccccttttgaatttcagaagctcctaaacaacttgacctctatcaagatacgtgggacatacagtgagagaagtgctggatatttggatgatgtcaccctggcaagtgctcgtcctgggcctggagtccctgcaacttgggtggagtcctgcacctgtcctgtgggatatggagggcagttttgtgagatgtgcctctcaggttacagaagagaaactcctaatcttggaccatacagtccatgtgtgctttgcgcctgcaatggacacagcgagacctgtgatcctgagacaggtgtttgtaactgcagagacaatacggctggcccgcactgtgagaagtgcagtgatgggtactatggagattcaactgcaggcacctcctccgattgccaaccctgtccgtgtcctggaggttcaagttgtgctgttgttcccaagacaaaggaggtggtgtgcaccaactgtcctactggcaccactggtaagagatgtgagctctgtgatgatggctactttggagaccccctgggtagaaacggccctgtgagactttgccgcctgtgccagtgcagtgacaacatcgatcccaacgcagttggaaattgcaatcgcttgacgggagaatgcctgaagtgcatctataacactgctggcttctattgtgaccggtgcaaagacggattttttggaaatcccctggctcccaatccagcagacaaatgcaaagcctgcaattgcaatccgtatgggaccatgaagcagcagagcagctgtaaccccgtgacggggcagtgtgaatgtttgcctcacgtgactggccaggactgtggtgcttgtgaccctggattctacaatctgcagagtgggcaaggctgtgagaggtgtgactgccatgccttgggctccaccaatgggcagtgtgacatccgcaccggccagtgtgagtgccagcccggcatcactggtcagcactgtgagcgctgtgaggtcaaccactttgggtttggacctgaaggctgcaaaccctgtgactgtcatcctgagggatctctttcacttcagtgcaaagatgatggtcgctgtgaatgcagagaaggctttgtgggaaatcgctgtgaccagtgtgaagaaaactatttctacaatcggtcttggcctggctgccaggaatgtccagcttgttaccggctggtaaaggataaggttgctgatcatagagtgaagctccaggaattagagagtctcatagcaaaccttggaactggggatgagatggtgacagatcaagccttcgaggatagactaaaggaagcagagagggaagttatggacctccttcgtgaggcccaggatgtcaaagatgttgaccagaatttgatggatcgcctacagagagtgaataacactctgtccagccaaattagccgtttacagaatatccggaataccattgaagagactggaaacttggctgaacaagcgcgtgcccatgtagagaacacagagcggttgattgaaatcgcatccagagaacttgagaaagcaaaagtcgctgctgccaatgtgtcagtcactcagccagaatctacaggggacccaaacaacatgactcttttggcagaagaggctcgaaagcttgctgaacgtcataaacaggaagctgatgacattgttcgagtggcaaagacagccaatgatacgtcaactgaggcatacaacctgcttctgaggacactggcaggagaaaatcaaacagcatttgagattgaagagcttaataggaagtatgaacaagcgaagaacatctcacaggatctggaaaaacaagctgcccgagtacatgaggaggccaaaagggccggtgacaaagctgtggagatctatgccagcgtggctcagctgagccctttggactctgagacactggagaatgaagcaaataacataaagatggaagctgagaatctggaacaactgattgaccagaaattaaaagattatgaggacctcagagaagatatgagagggaaggaacttgaagtcaagaaccttctggagaaaggcaagactgaacagcagaccgcagaccaactcctagcccgagctgatgctgccaaggccctcgctgaagaagctgcaaagaagggacgggataccttacaagaagctaatgacattctcaacaacctgaaagattttgataggcgcgtgaacgataacaagacggccgcagaggaggcactaaggaagattcctgccatcaaccagaccatcactgaagccaatgaaaagaccagagaagcccagcaggccctgggcagtgctgcggcggatgccacagaggccaagaacaaggcccatgaggcggagaggatcgcaagcgctgtccaaaagaatgccaccagcaccaaggcagaagctgaaagaacttttgcagaagttacagatctggataatgaggtgaacaatatgttgaagcaactgcaggaagcagaaaaagagctaaagagaaaacaagatgacgctgaccaggacatgatgatggcagggatggcttcacaggctgctcaagaagccgagatcaatgccagaaaagccaaaaactctgttactagcctcctcagcattattaatgacctcttggagcagctggggcagctggatacagtggacctgaataagctaaacgagattgaaggcaccctaaacaaagccaaagatgaaatgaaggtcagcgatcttgataggaaagtgtctgacctggagaatgaagccaagaagcaggaggctgccatcatggactataaccgagatatcgaggagatcatgaaggacattcgcaatctggaggacatcaggaagaccttaccatctggctgcttcaacaccccgtccattgaaaagccctagtgtctttagggctggaaggcagcatccctctgacaggggggcagttgtgaggccacagagtgccttgacacaaagattacatttttcagacccccactcctctgctgctgtccatcactgtccttttgaaccaggaaaagtcacagagtttaaagagaagcaaattaaacatcctgaatcgggaacaaagggttttatctaataaagtgtctcttccatcacgttgctaccttacccacacttccctctgatttgcgtgaggacgtggcatcctacttacgtacgtggcataacacatcgtgtgagcccatgtatgctggggtagagcaagtagccctcccctgtctcatcgatccagcagaacctcctcagtctcagtactcttgtttctataaggaaaagttttgctactaacagtagcattgtgatggccagtatatccagtccatggataaagaaaatgcatctgcatctcctgcccctcttccttctaagcaaaaggaaataaacatcctgtgccaaaggtattggtcatttagaatgtcggtagccatccatcagtgcttttagctattatgagtgtaggacactgagccatccgtgggtcaggatgcaattatttataaaagtccccaggtgaacatggctgaagatttttctagtatattaataattgactaggaagatgaactttttttcagatctttgggcagctgataatttaaatctggatgggcagcttgcactcaccaatagaccaaaagacatcttttgatattcttataaatggaacttacacagaagaaatagggatatgataaccactaaagttttgttttcaaaatcaaactaattcttacagcttttttattagttagtcttggaactagtgttaagtatctggcagagaacagttaatccctaaggtcttgacaaaacagaagaaaaacaagcctcctcgtcctagtcttttctagcaaagggataaaacttagatggcagcttgtactgtcagaatcccgtgtatccatttgttcttctgttggagagatgagacatttgacccttagctccagttttcttctgatgtttccatcttccagaatccctcaaaaaacattgtttgccaaatcctggtggcaaatacttgcactcagtatttcacacagctgccaacgctatcgagttcctgcactttgtgatttaaatccactctaaaccttccctctaagtgtagagggaagacccttacgtggagtttcctagtgggcttctcaacttttgatcctcagctctgtggttttaagaccacagtgtgacagttccctgccacacacccccttcctcctaccaacccacctttgagattcatatatagcctttaacactatgcaactttgtactttgcgtagcaggggctggggtggggggaaagaaacctattatcatggacacactggtgctattaattatttcaaatttatatttttgtgtgaatgttttgtgttttgtttatccatgctatagaacaaggaatttatgtagatatacttagtcctatttctagaatgacactctgttcactttgctcaatttttcctcttcactggcacaagtatctgaatacctccttccctcccttctagagttctttggattgtactccaaagaattgtgccttgtgtttgcagcatctccattctctaaattaatataattgctttcctccacacccagccacgtaaagaggtaacttgggtcctcttccattgcagtcctgatgatcctaacctgcagcacggtggttttacaatgttccagagcaggaacgccaggttgacaagctatggtaggattaggaaagtttgctgaagaggatctttgacgccacagtgggactagccaggaatgagggagaaatgccctttttggcaattgttggagctggataggtaagttttataagggagtacattttgactgagcacttagggcatcaggaacagtgctacttactggtgggtagactgggagaggtggtgtaacttagttcttgatgatcccacttcctgtttccatctgcttgggatataccagagtttaccacaagtgttttgacgatatactcctgagctttcactctgctggcttctcccaggcctcttctactatggcaggagatgtggtgtgctgttgcaaagttttcacgtcatcgtttcctggctagttcatttcattaagtggctacatcctaacatatgcattggtcaaggttgcagcaagaggactgaagattgactgccaagctagtttgggtgaagttcactccagcaagtctcaggccacaatggggtggtttggtttggtttccttttaactttctttttgttatttgcttttctcctccacctgtgtggtatattttttaagcagaattttattttttaaaataaaaggttctttacaagatgataccttaattacactcccgcaacacagccattattttattgtctagctccagttatctgtattttatgtaatgtaattgacaggatggctgctgcagaatgctggttgacacagggattattatactgctatttttccctgaattcttttccttggaattccaactgtggaccttttatatgtgccttcactttagctgtttgccttactctacagccttgctctccggggtggttaataaaatgcaacacttggcatttttatgttataagaaaaacagtattttatttataataaaatctgaatattttgtaacccttta

SEQ ID NO: 304 - DNA, 3723 bp, Homo sapiens
tgcttaatccgtttctggaggaagagtatgacacccacttgtgatggggtccttgtgcggtggggaccggggccggcgggctccaggccagcacacctaacccatggatgtggaacctacggccgagaaggaatgttgcatgagtcggatcccagtccattgtcagtggagggtgagggtgaccccatctgctatttttgtgctcatcctcatacaaccatttggggatgtgcctattagggctccgtaagaactcagatgcctgggaagcccagcccctcaggtgcccccacacacagccttcccttgacgcctacatttctaggcacatgtgaggcatctttcctggagccccgagccagccctgtccctccccagtgcagcatggcactcaggagatacaggctggacatggggcagtcgttctggggaggcctggcctagcagccacccacctgagccctcccggccaggcttcgtgctggggtgggccatgtgccaggacaggagggtcccggcggaaagccagccccggactcatcgtgacattgagatcccactggagggtaggggtggtaataaacttctccctctcctcctcccgctgcagccctccaccctccttccctgcagctctactcttttctttgtagccctcctccttatccagccctccacccctcccctggcagccctactccctccccttcctcctcctgtctgcagccttcaactccctcctcctcctatacttctctccctcatcttccctcaggacccagccctaatgccagcaccccaagccttcgctgacccttagcagggaagctcccgactgggtgcacgcggccgtgcccaggaactctggttcgggcctgctgcagggctcgtttgcctctccagcggtggctctcaggtgctgcggtgccgtggccaaggagccacacaagaaggcccacgacctgtgtccctcagctttgtgcatctgcttctccgggacggggcccccttgagggcaggcctggtggaccaccctgtttcccatgaggccttgcacaggccttcctgtggacactggacacgggtgactgaacctgaagtgtgagatgtttctaagatctcatgaagtgtgagatgtttctaaaatctctacatgggccgaccacaacctgctatcttctgctactgtgtgccatgctagagctcccctaccctgggaacaaacgccagggtgccctgcggcccggctctcctcggttcccctgatccatccagggaacaaacgccagggtgccctgcggcccggctctcctcggttcccctgatccgcccagagaacaaacgccagggtgccctgcggcccggctctcctcagttcccctgatccatccagggaacaaatgccaggtgccctgaggcctggctctcctcagtcctccgatcgggtccagtccattttcattcatttcactttggtctcctgtctgtctgtgcctctgggccaaactcattgcagggccatggccccgggcaggccccaccttcctgctttctgatgcagcgatattcttccctttttaggacctcactctgtcgcccaggctggagtgcagtggcgcagtcttggctcattgcagcctctgcctcccgggttcaagtgattcttgtgcctcagcctcctgagtagctggaattgcaggcgcctgccaccacgcctggctaatttttctatttttcatagagatggggttttgccatgttggccaggctggtctcgaactcctgacctcaagggatccacccacctcggcctcccaaagtgctggaattacaggtgtgagccaccgcacccagctgacattctcctcttaaagcctgtctgatgccagctcaggccacagggcacattaggcttctgacaaagctggaggacaaggccccctcgcatgccccatcctctcctcgcccccccctcccccgagtgcctccttcgaagccctgcctccctctatcatgccctccccccacgcagcctcaagaaacatgaagaggggacctctggggtggtctggcaacgcctgcctggtggacagcagatgggagagaaggaaagcagccggtaggagaagagacagaggaaaggggaggaggaagcccatgctcaaggtgcccctcctgcccaggcttcctgccagatgcttcttggatcaaatactttgttatatttccagcacaagaaagtgatgttacaaacactaagagaattcagagaaacagcaggatttaaagtagcacacagagatctttgtgcatactttcagttcaaagacagagtggaagagatgacccatttttaacagcaacaaaaagataaaaatccccatgcgtaaaaggaatgtgaaaccctaaatgggaaaaactttaaatagaccataaagacaccaaagtcgattttaacaccaccatggtttgaatgaattccccaaaagttcatgtgttggaaacctggactccaatgcagcagtgctgggatgggattctggggaggtgattggctcatgaggactaatccattcatggactaatgggttctcagggagtggagcagttatcaccagggggctggttataaaagccagctttgccgtctctcatgagaccctcacataatgcccggcaccacttgagactgcagagtcttgaccagcaagaaggtcctcaccagatgcaactcctataccttggactccctgcctccagaactgtaagaaataaaattcttttctttataacttacccactctgtggtattcagtcatagcaacagaaaatgaattaagacagaaagaaagaccatgttcctggataagaaaactctcctaagcaagacaattctacaaaagtaaatttataaatgtaatgtaatccttataaaaacgccgcatgcttttccccagatctagaaaactaattataaagttcatgtgagagaggaagtgcacaggagtgtaaaaatagccaggaaaactctgcaaaagaaatggagaggtcctctgcccccgaaccatctcctggcctccgtaatggaaccacatgacaccaggacccatgtaggcaagcaggcccagggacatgaaaacccggggacagaccccagtgcctagaacattcagtctataaggtagcatatgataccggtgaggaaaggatggacttgttaatacaagtggttaaacgttaaccacttggagaaagacgaaaatgaatctgcacttcataccatacactaagacaaattccaaatgggtcaaaagtactaggaaaaagtgaattccttcatcaccggggagtgggcaaaatcttcttaaatatgacttaaaacccaggagtgataaaagacaaaatgtatactgggaaaaaagttttataacatagcacattttcaaagtgtcggtgacttgagtgggaagcagggcagtgactgtcggggactgagggtggggggatggtgttgaacgggcgcggggtctccttctggcgtgatgaaggctttggaagcacacagaagtgatggttgtacgttatgaatgtattaaatgctgctaaattgtagactttaagagatggttaaaatggtgaatttttttaaccatctataggactctgataaaaatgttgttttatgtatattttacctcaataaaaattataacttaaaatgag

SEQ ID NO: 305 - DNA, 4066 bp, Homo sapiens
cctcttgcggccacaggcgcggcgtcctcggcggcgggcggcagctagcgggagccgggacgccggtgcagccgcagcgcgcggaggaacccgggtgtgccgggagctgggcggccacgtccggacgggaccgagacccctcgtagcgcattgcggcgacctcgccttccccggccgcgagcgcgccgctgcttgaaaagccgcggaacccaaggacttttctccggtccgagctcggggcgccccgcaggcgcacggtacccgtgctgcagtcgggcacgccgcggcgccgggggcctccgcagggcgatggagccggtctgcaaggaaagtgaggcgccgccgctgcgttctggaggaggggggcacaaggtctggagaccccgggtggcggacgggagccctccccccgccccgcctccggggcaccagctccggctccattgttcccgcccgggctggaggcgccgagcaccgagcgccgccgggagtcgagcgccggccgcggagctcttgcgaccccgccaggacccgaacagagcccgggggcggcgggccggagccggggacgcgggcacacgcccgctcgcacaagccacggcggactctcccgaggcggaacctccacgccgagcgagggtcagtttgaaaaggaggatcgagctcactgtggagtatccatggagatgtggagccttgtcaccaacctctaactgcagaactgggatgtggagctggaagtgcctcctcttctgggctgtgctggtcacagccacactctgcaccgctaggccgtgcccgaccttgcctgaacaagcccagccctggggagcccctgtggaagtggagtccttcctggtccacccgggtgacctgctgcagttgcgctgtcggctgcgggacgatgtgcagagcatcaactggctgcgggacggggtgcagctggcggaaagcaaccgcacccgcatcacaggggaggaggtggaggtgcaggactccgtgcccgcagactccggcctctatgcttgcgtaaccagcagcccctcgggcagtgacaccacctacttctccgtcaatgtttcagatgctctcccctcctcggaggatgatgatgatgatgatgactcctcttcagaggagaaagaaacagataacaccaaaccaaaccgtatgcccgtagctccatattggacatccccagaaaagatggaaaagaaattgcatgcagtgccggctgccaagacagtgaagttcaaatgcccttccagtgggaccccaaaccccacactgcgctggttgaaaaatggcaaagaattcaaacctgaccacagaattggaggctacaaggtccgttatgccacctggagcatcataatggactctgtggtgccctctgacaagggcaactacacctgcattgtggagaatgagtacggcagcatcaaccacacataccagctggatgtcgtggagcggtcccctcaccggcccatcctgcaagcagggttgcccgccaacaaaacagtggccctgggtagcaacgtggagttcatgtgtaaggtgtacagtgacccgcagccgcacatccagtggctaaagcacatcgaggtgaatgggagcaagattggcccagacaacctgccttatgcccagatcttgaagactgctggagttaataccaccgacaaagagatggaggtgcttcacttaagaaatgtctcctttgaggacgcaggggagtatacgtgcttggcgggtaactctatcggactctcccatcactctgcatggttgaccgttctggaagccctggaagagaggccggcagtgatgacctcgcccctgtacctggagatcatcatctattgcacaggggccttcctcatctcctgcatggtggggtcggtcatcgtctacaagatgaagagtggtaccaagaagagtgacttccacagccagatggctgtgcacaagctggccaagagcatccctctgcgcagacaggtaacagtgtctgctgactccagtgcatccatgaactctggggttcttctggttcggccatcacggctctcctccagtgggactcccatgctagcaggggtctctgagtatgagcttcccgaagaccctcgctgggagctgcctcgggacagactggtcttaggcaaacccctgggagagggctgctttgggcaggtggtgttggcagaggctatcgggctggacaaggacaaacccaaccgtgtgaccaaagtggctgtgaagatgttgaagtcggacgcaacagagaaagacttgtcagacctgatctcagaaatggagatgatgaagatgatcgggaagcataagaatatcatcaacctgctgggggcctgcacgcaggatggtcccttgtatgtcatcgtggagtatgcctccaagggcaacctgcgggagtacctgcaggcccggaggcccccagggctggaatactgctacaaccccagccacaacccagaggagcagctctcctccaaggacctggtgtcctgcgcctaccaggtggcccgaggcatggagtatctggcctccaagaaggtgtggaacctgaaggctcccctggtgcatacaccgagacctggcagccaggaatgtcctggtgacagaggacaatgtgatgaagatagcagactttggcctcgcacgggacattcaccacatcgactactataaaaagacaaccaacggccgactgcctgtgaagtggatggcacccgaggcattatttgaccggatctacacccaccagagtgatgtgtggtctttcggggtgctcctgtgggagatcttcactctgggcggctccccataccccggtgtgcctgtggaggaacttttcaagctgctgaaggagggtcaccgcatggacaagcccagtaactgcaccaacgagctgtacatgatgatgcgggactgctggcatgcagtgccctcacagagacccaccttcaagcagctggtggaagacctggaccgcatcgtggccttgacctccaaccaggagtacctggacctgtccatgcccctggaccagtactcccccagctttcccgacacccggagctctacgtgctcctcaggggaggattcggtcttctctcatgagccgctgcccgaggagccctgcctgccccgacacccagcccagcttgccaatggcggactcaaacgccgctgactgccacccacacgccctccccagactccaccgtcagctgtaaccctcacccacagcctgctgggcccaccacctgtccgtccctgtcccctttcctgctggcaggagccggctgcctaccaggggccttcctgtgtggcctgccttcaccccactcagctcacctctccctccacctcctctccacctgctggtgagaggtgcaaagaggcagatctttgctgccagccacttcatcccctcccagatgttggaccaacacccctccctgccacaggcactgcctggagggcagggagtgggagccaatgaacaggcatgcaagtgagagctttctgagctttctcctgtcggtttggtctgttttgccttcacccataagcccctcgcactctggtggcaggtgcttgtcctcagggctacagcagtagggaggtcagtgcttcgtgcctcgattgaaggtgacctctgccccagataggtggtgccagtggcttattaattccgatactagtttgctttgctgaccaaatgcctggtaccagaggatggtgaggcgaaggccaggttgggggcagtgttgtgccctgtcccagcccaaactgggggctctgtatatagctatgaagaaaacacaaagtgtataaatctgagtatatatttacatgtctttttaaaagggtcgttaccagagatttacccatcgggtaagatgctcctggtggctgggaggcatcagttgctatatattaaaaacaaaaaagaaaaaaaaggaaaatgtttttaaaaaggtcatatattttttgctacttttgctgttttatttttttaaattatgttctaaac

SEQ ID NO: 306 - DNA, 2312 bp, Homo sapiens
tccagtgacggagccgcccggccgacagccccgagacgacagcccggcgcgtcccggtccccacctccgaccaccgccagcgctccaggccccgcgctccccgctcgccgccaccgcgccctccgctccgcccgcagtgccaaccatgaccgccgccagtatgggccccgtccgcgtcgccttcgtggtcctcctcgccctctgcagccggccggccgtcggccagaactgcagcgggccgtgccggtgcccggacgagccggcgccgcgctgcccggcgggcgtgagcctcgtgctggacggctgcggctgctgccgcgtctgcgccaagcagctgggcgagctgtgcaccgagcgcgacccctgcgacccgcacaagggcctcttctgtgacttcggctccccggccaaccgcaagatcggcgtgtgcaccgccaaagatggtgctccctgcatcttcggtggtacggtgtaccgcagcggagagtccttccagagcagctgcaagtaccagtgcacgtgcctggacggggcggtgggctgcatgcccctgtgcagcatggacgttcgtctgcccagccctgactgccccttcccgaggagggtcaagctgcccgggaaatgctgcgaggagtgggtgtgtgacgagcccaaggaccaaaccgtggttgggcctgccctcgcggcttaccgactggaagacacgtttggcccagacccaactatgattagagccaactgcctggtccagaccacagagtggagcgcctgttccaagacctgtgggatgggcatctccacccgggttaccaatgacaacgcctcctgcaggctagagaagcagagccgcctgtgcatggtcaggccttgcgaagctgacctggaagagaacattaagaagggcaaaaagtgcatccgtactcccaaaatctccaagcctatcaagtttgagctttctggctgcaccagcatgaagacataccgagctaaattctgtggagtatgtaccgacggccgatgctgcaccccccacagaaccaccaccctgccggtggagttcaagtgccctgacggcgaggtcatgaagaagaacatgatgttcatcaagacctgtgcctgccattacaactgtcccggagacaatgacatctttgaatcgctgtactacaggaagatgtacggagacatggcatgaagccagagagtgagagacattaactcattagactggaacttgaactgattcacatctcatttttccgtaaaaatgatttcagtagcacaagttatttaaatctgtttttctaactgggggaaaagattcccacccaattcaaaacattgtgccatgtcaaacaaatagtctatcttccccagacactggtttgaagaatgttaagacttgacagtggaactacattagtacacagcaccagaatgtatattaaggtgtggctttaggagcagtgggagggtaccagcagaaaggttagtatcatcagatagctcttatacgagtaatatgcctgctatttgaagtgtaattgagaaggaaaattttagcgtgctcactgacctgcctgtagccccagtgacagctaggatgtgcattctccagccatcaagagactgagtcaagttgttccttaagtcagaacagcagactcagctctgacattctgattcgaatgacactgttcaggaatcggaatcctgtcgattagactggacagcttgtggcaagtgaatttcctgtaacaagccagattttttaaaatttatattgtaaatattgtgtgtgtgtgtgtgtgtgtatatatatatatatatgtacagttatctaagttaatttaaagttgtttgtgcctttttatttttgtttttaatgctttgatatttcaatgttagcctcaatttctgaacaccataggtagaatgtaaagcttgtctgatcgttcaaagcatgaaatggatacttatatggaaattctctcagatagaatgacagtccgtcaaaacagattgtttgcaaaggggaggcatcagtgtccttggcaggctgatttctaggtaggaaatgtggtagctcacgctcacttttaatgaacaaatggcctttattaaaaactgagtgactctatatagctgatcagttttttcacctggaagcatttgtttctactttgatatgactgtttttcggacagtttatttgttgagagtgtgaccaaaagttacatgtttgcacctttctagttgaaaataaagtatattttttctaaaaaaaaaaaaaaacgacagcaacggaattc

SEQ ID NO: 307 - DNA, 3824 bp, Homo sapiens
gcggggctagagctgtcggagaagcgggaccgcgaggccggcgcgcggcgctctgcgcggtcagagggagcgcctggcagcagcaggagcagcagcagcagcccgcggcggggccgccgccagccgccgcgaccgccgcggctgcagcctccgaagggaggccgggtgagccggcgtacgcactttcccgcggactttcggagtgtttgtggatatacatgccaagccgccacgatgatgtccatgaacagcaagcagcctcactttgccatgcatcccaccctccctgagcacaagtacccgtcgctgcactccagctccgaggccatccggcgggcctgcctgcccacgccgccgctgcagagcaacctcttcgccagcctggacgagacgctgctggcgcgggccgaggcgctggcggccgtggacatcgccgtgtcccagggcaagagccatcctttcaagccggacgccacgtaccacacgatgaacagcgtgccgtgcacgtccacttccacggtgcctctggcgcaccaccaccaccaccaccaccaccaccaggcgctcgaacccggcgatctgctggaccacatctcctcgccgtcgctcgcgctcatggccggcgcgggcggcgcgggcgcggcggccggcggcggcggcgcccacgacggcccggggggcggtggcggcccgggcggcggcggcggcccgggcggcggcggccccgggggaggcggcggtggcggcccggggggcggcggcggcggcccgggcggcgggctcctgggcggctccgcgcaccctcacccgcatatgcacagcctgggccacctgtcgcaccccgcggcggcggccgccatgaacatgccgtccgggctgccgcaccccgggctggtggcggcggcggcgcaccacggcgcggcagcggcagcggcggcggcgtcggccgggcaggtggcagcggcatcggcggcggcggccgtggtgggcgcagcgggcctggcgtccatctgcgactcggacacggacccgcgcgagctcgaggcgttcgcggagcgcttcaagcagcggcgcatcaagctgggcgtgacgcaggccgacgtgggctcggcgctggccaacctcaagatcccgggcgtgggctcactcagccagagcaccatctgcaggttcgagtcgctcacgctctcgcacaacaacatgatcgcgctcaagcccatcctgcaggcgtggctcgaggaggccgagggcgcccagcgcgagaaaatgaacaagcctgagctcttcaacggcggcgagaagaagcgcaagcggacttccatcgccgcgcccgagaagcgctccctcgaggcctacttcgccgtgcagccccggccctcgtccgagaagatcgccgccatcgccgagaaactggacctcaaaaagaacgtggtgcgggtgtggttttgcaaccagagacagaagcagaagcggatgaaattctctgccacttactgagggggctgggaggtgtcgggcgggacagaatggggagctgaggaggcatttttggggggctttcctctgcttgcctcccctcggatttggagtgtccgttatcctgcctgcatttggggagtcccttctcgctctctttcctccacccattctctgattttcctgcctttgctgtcccctagccttgaggactggggtgctgggtgtggggattggagtatagggtaggggagaagggggggagcattcgggggagtggggagtggggggaaggaaagcggagacccgagcaggggttttaaggagcaggatggttctggggtttgggtggggggagacgcgggaagggtaggaaaatggactgtttctgaccagagacacttacctaaatatcctggggaccaaggaactatgtacaaaaacaaacctaccaaccaccaaaaactagacaaataaagacaaactaaaacaaaacagaacaaaagcaaaggaaaatgctttagaaattttaactccggggagccataatctgcaacttcattttcccccatagaagagaaaaaagagcaccaccattattaccacctccccaaccctacacgcacgaactgagtcgaaaaacgaaaaccaaacgagcgagaagttgaagttctgggtatcaaagctagttgttctgtctgcgtgtttaatttttccctctctcacctccaccccatccatatcctctttatttcctccgttccaatgagaggcctatggctgctctccaatcccgggaagtgagtgggagcacagctgaaaagagagggtcagggggaggctggctgcttgcttaggtggaatccaacttttcccgtggccctgcctatactctggtggcctggtcctgttggggtgggggtctttggagagaagggcatagtctttgagctactaaaaagcagaattccggagcttcgagatatcttattctaggaaaatgaaacaattttaacaacagttttttttcctcttatgtcgaagatctagttttagacaatttcaaaataagcttttcccactcatagaactttaacttgccctttcagttttatcttttttttagagagaggtttaaactactgatttttcctgttgattcaaatagactaatggggtgaaagttattaggagagatactctctcctgttttctccactgaacgagactcatcttgctcttctaggtcccgtttcttcctctcttggaggacatgaaattatagaaatgttgagaagttcctgctttcttttgcggtaggacttggctgtgagaaaatcacctaaatcccagaaaagaggaagacagatttaaagtgcccccacccccatttgtttcaaagaggtctgcatgttgggcgaaaacagaacaactgtgtttccttttacttgttcttattattcaagagtcatttattacaggggataaatgttgggtagcaagaactttaatttgcactaccagtctcccaaatagaaaatcatgtatagtatttcatagtaataatcaggtaccttacaagctgctggtggattttaaaaaattaagatagttgaaggtggttaggtaaaatgcctgctttgtgtacaagatactctttggatctctcgtagagatggtttgttaccatcctttaatcataactaaaacattgaaaacagaacaaatgagaaaagaaaaaaaacctgccgattaacaagactgaaatcatgcatgatctgaaaggtgtggaaagaaacacaattaggtctcactctggttaggcattatttatttaattatgttgtatatcattgtttgcagggcaaacattctatgcatttgaaactgagcactaaactgggctagctttctggtagaccgttttgtggctagtgcgatttcacagtctactgcctgtttccactgaaaacatttttgtcatattcttgtattcaaagaaaacaggaaaaaagttattgtaaatattttatttaatgcacacattcacacagtggtaacagactgccagtgttcatcctgaaatgtctcacggattgatctacctgtctatgtatgtctgctgagctttctccttggttatgttttttctcttttacctttctcctcccttacttctatcagaaccaattctatgcgccaaatacaacagggggatgtgtcccagtacacttacaaaataaaacataactgaaagaagagcagttttatgatttgggtgcgtttttgtgtttatactgggccaggtcctggtagaacctttcaacaaacaaccaaacaaaaaaaaa

SEQ ID NO: 308 - DNA, 4459 bp, Homo sapiens; identical to SEQ ID NO: 192

SEQ ID NO: 309 - DNA, 4550 bp, Homo sapiens
cccagcatccctggcgcggccatttcagccccatcttggcccagcggagggagctgcagccgccgcttcagcagtttgaatttcagtttcttcggggtttaggaattgggcgcaccgaggaggagccggagaagccaccaccgctacctcacacagccggggcgcctccggtcccgtgccagcggtctgccgccgccgcccctctctgagagaagccgcgaggggaggccgagaccgccgtcgccgcccgcccgcaggggtggttccccctgtaaggggaggaccgagccggctttcccctcccccagagcgggtttccgcctgaggcagtcgacatgtccctggggctgagctccggctagagccggggagggagggccgcctgcccgcgccacagccccaccgcccgcccgcggaccttcagccagctccggcccgcggctcccggctgaattaggcatctccgactccggactcgccgctccttccctcagtcagagagcccagcgctgacgccggcaccggcctgaggagcccgagcggggcagcaccgcccctcacgccgccgccaccgcctcctcctcctcctcttcgccctcccactcccacccccagccaaggcctgctgaccgcgccgagcgccgagctggactgaccacggctgcccggagacgagagaggaagcagccggcccgcccctgggttcgcgctctcgccgcctctgagggaattgaattgaggcgccgcggctgcgagagctaaaaaggaaggaggagccgccgcgggactgagacgggggcagagccgaagagaccgacacagagaaggaaacgaggaggaggatgtctcaccgggcggccagcgcctggatcagcccgtgactcttaacagcggcgggcctcagaccccagcgcagactcggactttgtctttgggggcccgtgctctgccctccccggtttccgacaggacccagaggagccggcgtgcctctctgccctccagccttcttcaccatgtccaagatgccggccaagaagaagagctgcttccagatcaccagtgtcaccacggcccaggtggccactagcatcaccgaggacaccgagagcttggacgacccggacgagtcacgcacagaggacgtctcctccgagattttcgacgtctctcgggccacggattatggccctgaggaggtctgcgagcgcagctcttccgaagagacgcttaacaatgttggggatgcggagactcccgggaccgtctccccaaacctcctcctagatgggcagctggcagcggcggctgctgctcccgccaacggaggaggagtcgtttcggcccggagcgtgtctggggcgctcgccagtaccctggcggcggctgccacttcggcccccgcccccggagcacccggcggcccccagctcgcgggctcatccgccgggccagtgactgcagccccatctcagcctcccaccacatgtagttcccgttttcgcgtgatcaagctggaccacgggagcggagagccctatagacgcggccgatggacgtgtatggaatactatgagagggattcagacagcagcgtcctgactagatccggggattgcattagacacagcagtacttttgaccagactgcggagcgggacagcggcctgggcgccaccggagggtcggtggtggtagtagtggcctccatgcagggggcgcacgggcccgagtcgggaactgacagctccttgactgctgtgtcacagctacccccgtcggagaaaatgagccagcccactccggcccagccgcagagttttagcgttgggcagccacagccgccgccgccacccgtaggtggggctgtggctcaaagctcggctccgctgccgccgttcccgggagccgcgaccgggccgcagccaatgatggcagccgcgcagcccagccagccccagggagcggggcccgggggacagactctgccgccgacgaatgtaaccctggcgcagccggctatgtccctgcctccgcagccgggccctgcagtgggcgcccccgcggcgcagcagccccagcagttcgcgtatcctcagcctcagataccgcccggacatttgctgcccgtccagccctccggccagagtgagtacctgcagcagcacgtggccggcctgcagccgccaagccccgcgcagccctcgtccaccggcgccgcagcgagccccgccacggcggccacccttcccgtgggcaccggccagaatgcttcctcggtgggcgcgcagctcatgggcgcgtcttcccagcccagcgaagccatggccccccggacgggaccagcgcaaggcgggcaggtcgcgccttgtcagccgactggagtgcccccggctactgtgggaggcgtggtgcagccgtgcctcggtcctgccggggctgggcagccccagtccgtgcctccgccgcagatgggtggcagtggtccgctgtcagccgtacctggtggccctcacgccgtggtgcccggagttccaaacgtgcctgcagccgtgcccgctccaagcgtgcctagtgtgtctaccacttctgttactatgccaaatgtacccgcgcctctggcccagtcgcaacagctgagcagccatacgccagtcagcaggagcagcagcataatccagcatgttgggctgcccttagcgccaggcacacacagcgcaccaacaagtctaccacagtctgacctaagccagtttcaaactcagacccagcctttagtcgggcaagtcgacgatactagaagaaaatcagaacccctacctcaaccaccactttctctcattgctgaaaataagcctgttgtgaagccgcctgttgcagattccctggcaaacccccttcagttaacacctatgaacagtctggccacctctgtattcagcatagctattcctgttgatggtgatgaagacaggaatccttcaactgctttctaccaagcgttccatttgaacacgttaaaggaatcaaagagcctctgggatagtgcatctgggggaggtgttgtagccattgacaacaaaatagaacaagcaatggatctggtgaaaagccatttgatgtatgcagtaagagaagaagtggaagttttaaaggaacaaataaaagaattagttgaaagaaactctttacttgaacgagaaaatgcactgttaaaatctctttcaagcaatgatcaattatcccaactcccaacccaacaggccaatcctggtagcacttctcaacagcaagcagtgatagcacagcctccgcagccaacgcaacctccacagcagccgaatgtctcctcagcataaagctttcttaagcctcattaagaaaaaaactgaaagcaatctatccttgtgtgccactggtgttctttccactttatacgaaagcaagtagccatgctttggttgtgtgtttggccttttcagtattagacaatcattctacaagagcttttcctctctctgagatgtcatgcagcgctgttgatgtccagttctatgtcatcagtacacaaggagaataatagatggggtttattaaagcgagcaaagtctgcattttacctggtgcgcatgagtggggtctttaagagttttggtggctctcccatgtttcctattacccatggatttaccctgagccttcctatcacattataaataacagttcatctaaagagccacttttctttctgattcagtaacatttgcctacataagttttcatttatttgtgttttatttattacagggctgctattttcataatgtacatgaacaatgtcacagaacttttttaatttttttgaataattataagtatcagtaaaggaagtgaaagacaggattgcatttaatagataaaacgtttaggcaataattgaacaaaagaatcctggcatatttctaacactaatggcaatttacttatggtatttattttcagtagtaaagacccagcttgaatgtaaattttgtatagtgtaagtatgaagaacatagtgcaactgtacaggtagtcaccagttattgtgatatgataaataattgggctattttgatgaagaaaactttgttcatttgtttctactttctaagagaaattgccacgattcctctgcttttcaacatttcgtatgacttttttttcgggtgggaataaaaagctgtgaaattgttcaacctactttgtaaccaaagaagcaaagctgtgtaatggagtttggttttttttttgttgttttttttttttttgtcttttttttttttataatgcacattctttatgtatttttatttagtgttttctcagtcacaattttctttactgtctagcatgatctgcatgacctataatctttgaaccactttcgtacctcatgtttttatccagcactcttattgtaatatgtactagtctgtgaacaatgtcaaataaaagagaacgaacaggtagtttggtggagctgagctagtgtacaatacactagttgt

SEQ ID NO: 310 - DNA, 3542 bp, Homo sapiens
  misc_feature (2283)..(2283): N may be C, G, T or A
  misc_feature (2690)..(2690): N may be C, G, T or A
cacctcagtaccctcatgttgtactagctcatgagaccaccactgctgtcactgacccacggtaccgtgcccgcggcagcccgcacttccagcatgctgaagtcaggatcctgcaggcccaggtgcctcctgtgttcctccaacagcagcagcagtaccagtacctgcagcaatctcaggagcacccccctcccccacatccagctgctctcggccatggccccctgagctccctcagtccacctgctgtggaggggccagtgagtgcccaggcctcctcagccacctcgggcagtgcccacctggcccagatggaggccgtgctgagggagaatgccaggctgcagagagacaatgagcggctgcagagggagctggagagctctgcggagaaggctggccgcattgagaagctggaaagcgaaatccagcggctctctgaggcccatgagagcctgaccagagcctcctccaagcgtgaggccctggagaagaccatgcggaacaagatggacagtgaaatgaggaggctgcaagacttcaaccgggatcttagagagagattggaatctgcaaatcgccgcctggcaagcaagacacaggaagcccaggccggcagtcaggacatggtggccaagctgcttgctcagagctacgaacagcagcaggagcaagagaagctggagcgagagatggcactgctgcgcggcgccatcgaggaccagcggcggcgtgccgagctgctggagcaggctctgggcaatgcgcagggccgggcagctcgagccgaagaggagctgcgcaagaagcaggcctatgtggagaaagtggagcggctgcagcaggcgctcgggcagctgcaggcagcctgtgagaagcgggagcagctggagctgcgtctgcggactcgcctggagcaggaactcaaggccctgcgtgcacagcagagacaggcaggtgccccaggtggtagcagtggcagtggtgggtctccagagctcagcgccctgcgactgtcagaacaactgcgagagaaggaggagcagatcctggcgctggaggccgacatgaccaagtgggagcagaagtatttggaggaacgtgccatgaggcagtttgccatggatgcggctgccacggctgctgctcagcgtgacaccactctcatccgacattccccccagccctcacccagcagcagcttcaatgagggcctgctcactggtggccacaggcatcaggagatggaaagcaggttaaaggtgctccatgcccagatcctggagaaggatgcagtgatcaaggtccttcagcagcgctccaggagagaccctggcaaggccatccagggctccctgcggcctgccaagtcggtgccatctgttttcgcggctgcggcagcaggaaccaagggctggcaagggctctcttctagtgagcgacaaacagcagacgcccctgctcggctgactacagacagagcacccacagaggagccagtggtcacagctccccctgctgcccatgccaaacacgggagcagagatgggagcacccagactgacggccccccagacagcacctccacctgcctgccaccggagcctgacagccttctggggtgcagcagtagccagagagcagcctctctggactctgtagctacatccagagtccaggacttgtcagacatggtggagatactgatctgaaggaggtggtgcttcaggactctgagccattctctcccctcctctgccctgtgccactctcagccatttcagcagccccgtcaaccgctgctccgtccctttccccagccagacactcattcccattgaccatctggtcccaggagctcaggaggaggaccccaggggagaggagagctgtgagagcaccggcacccccagaagactctgcttcttagcccacattcctccgggccttatggagaatgaggattcagccttgacttcttgcccaaggcctgctactggggtagcaactgacagctcagaaaggagctgagctccctctgccctgccagttgtcagtcaggcagggagggagtggctgtgttggtttggggaactaatttccacggacggctgcccgtggacaccaggtggactggttcactaatcaagtcagccatattgttctctggctaagtttggttccagccaacgtcatctgctcttcagttcctcactgccttcttgggatactaagacttgaattttttggggactattaagggtgttagtcttggagaagacncagcctcaccttctcacttgctgtgggtgaggggccattttaagtggactgggagacagtgcgcagtttgtatataattccctttcttgtggaacagaagactgaggcctgcaggttccgatgtgtctccatgggctgtgctcccctcttcctactgtcagtttctgaaacttctgactggcctcccagttatgcctcctcctcaagttcctggcccgtggatgttaaagctgctcgattcccaggatctcggctgccttttcctctatcttgagccctataaatgcccacgggacccccaccaccagcctcttgaagtggctccacagctccctgtccctggaacatcctgtcagtttggtcataaaccctgagccagatgaaatgagccaccgtgaacagacatntgccatgcccccaggtgggcttcggtggccctacccggtaccagttctttctgagaaactggagatgtcttgttagcataagtgtcttcattcccacctggagggtttgggagaggagcaaagcagttgaaaactagttaatgagctacaagagtcaaatagtcctctgaatggagcccccatcacaaaacagtgcccaggaggctggctcctcaagctacccatgcccagcgccctaaagcagcaccagatgctttggaattggggtgaaacacccacatggcagcctgctagcagcagtgactttgacttctggtcttaaagagtccctcacttcagccccaggagctattggtgggttttagcagttttgtctttaccgtttttagttctccttgattctttgttttcttcctttatcgtttttaggtttggtatgtgttgttttatttccatggttcctcaagtttcctttttaaacatttgcatttgctggacaattgcaattttttttaaaaaattcccctacccctgtttaaagctgaaaaatacatttggttcatgtgcattgtttacaaagcaaaaagaaaaaagaggaaaaaaaggcaaaaaatattgtgaaagaaaaaaaacaacttaatatattttggattaatatttggtatttcttttaaagtattttttgtgctgtgaacattttctgccaaagaccatgatgtgtgtctgtatgtttaagttatcgtaaatatttaaaatgtaaacatggctgttttgttatgccaccctgtaccaggattgctgccgcattccactgggtataacagtattttaattaaaaaaaaataattaaaa

SEQ ID NO: 311 - DNA, 2383 bp, Homo sapiens
ggggctaccgcgcctttgcttcctggcgcacgcggagcctcctggagcctgccaccatcctgcctactacgtgctgccctgcgcccgcagccatgtgccgcaccctggccgccttccccaccacctgcctggagagagccaaagagttcaagacacgtctggggatctttcttcacaaatcagagctgggctgcgatactgggagtactggcaagtccgagtggggcagtaaacacagcaaagagaatagaaacttctcagaagatgtgctggggtggagagagtcgttcgacctgctgctgagcagtaaaaatggagtggctgccttccacgctttcctgaagacagagttcagtgaggagaacctggagttctggctggcctgtgaggagttcaagaagatccgatcagctaccaagctggcctccagggcacaccagatctttgaggagttcatttgcagtgaggcccctaaagaggtcaacattgaccatgagacccgcgagctgacgaggatgaacctgcagactgccacagccacatgctttgatgcggctcaggggaagacacgtaccctgatggagaaggactcctacccacgcttcctgaagtcgcctgcttaccgggacctggctgcccaagcctcagccgcctctgccactctgtccagctgcagcctggacgagccctcacacacctgagtctccacggcagtgaggaagccagccgggaagagaggttgagtcacccatccccgaggtggctgcccctgtgtgggaggcaggttctgcaaagcaagtgcaagaggacaaaaaaaaaaaaaaaaaaaaaaaaaatgcgctccagcagcctgtttgggaagcagcagtctctccttcagatactgtgggactcatgctggagaggagccgcccacttccaggacctgtgaataagggctaatgatgagggttggtggggctctctgtggggcaaaaaggtggtatgggggttagcactggctctcgttctcaccggagaaggaagtgttctagtgtggtttaggaaacatgtggataaagggaaccatgaaaatgagaggaggaaagacatccagatcagctgttttgcctgttgctcagttgactctgattgcatcctgttttcctaattcccagactgttctgggcacggaagggaccctggatgtggagtcttcccctttggccctcctcactggcctctgggctagcccagagtcccttagcttgtacctcgtaacactcctgtgtgtctgtccagccttgcagtcatgtcaaggccagcaagctgatgtgactcttgccccatgcgagatatttatacctcaaacactggcctgtgagccctttccaagtcagtggagagccctgaaaggaggctcacttgaatccagctcagtgctctgggtggccccctgcaggtggcccctgaccctgcgttgcagcagggtccacctgtgagcaggcccgccctggggcctcttcctggatgtgccctctctgagttctgtgctgtctcttggaggcagggcccaggagaacaaagtgtggaggcctcggggagtggcttttccagctctcatgccccgcagtgtggaacaaggcagaaaaggatcctaggaaataagtctcttggcggtccctgagagtcctgctgaaatccagccagtgttttttgtggtatgagaacaggcaaaaagagatgccccgagatagaaggggagccttgtgtttctttcctgcagacgtgagatgaacactggagtgggcagaggtggcmcaggaccatggcacccttagagtgcagaagctggggggagaggctgcttcgaagggcaggactggggatacctgcctgtcacctcagggcatcactgaacaaacatttcctgatggsaactcctgcggcagagcccaggctggggaagtgaactacccagggcagcccctttgtggcccaggataatcaacactgttctctctgtaccatgagctcctccaggagattatttaagtgtattgtatcattggttttctgtgattgtcataacattgtttttgttattgttggtgctgttgttatttattattgtaatttcagtttgcctctactggagaatctcagcaggggtttcagcctgactgtctccctttctctaccagactctacctctgaatgtgctgggaacctcttggagcctgtcaggaactcctcactgtttaaatatttatttattgtgacaaatggagctggtttcctagatatgaatgatgtttgcaatccccattttcctgtttcagcatgttatattcttataaaataaaagcaaaagtcaaatatgaaaaaaaaaaaaaaaaaaaaa

SEQ ID NO: 312 - DNA, 4277 bp, Homo sapiens
gaagatgagagactgcttaggcgccaccactagtaccatgagtccctgcactggttaaagccatcgccacaacctggacaggcagcaagggctctgggtttgcagagagccgaaatgaccatgactgccaacaagaattccagcatcacccacggagctggtggcactaaagcccctcgggggactctgagcaggtctcagtcagtctctccacctccagttctctccccaccaaggagtcccatctacccgctcagtgatagtgaaacctcagcctgcaggtaccccagccactccagctcccgggtgctcctcaaggaccggcaccccccagctccttcaccccagaatcctcaagatccctccccagatacttccccacccacctgtcccttcaagaccgccagcttcggttatttggacagaagcccttcggcgtgcaagagagacgcccaaaaggaaagtgtccaaggcgcagcccaggatgtagcaggggtcgctgcctgcctcccccttgcccagagcacgccattcccggggccagcagctggcccccggggcgtcttgctgacccgtaccggtacccgcagcccacagcctgggcatccgggagaagatatagcatgggaaggtcgccgagaggcgtcgcccaggatgagcatgtgtggagagaagcgggagggctctgggagcgagtgggcggccagtgagggctgccccagcctgggctgtcccagcgtggtgccgtccccctgcagctctgaaaagacctttgatttcaagggcctccggaggatgagcaggaccttctccgagtgttcctacccagagactgaggaggagggagaggcgctccctgtccgggactctttctaccggctggagaaacggctgggccggagtgagcccagcgccttcctcagggggcatggcagcaggaaggagagctcagcagtgctgagccggatccagaaaattgaacaggtcctgaaggagcagccgggccgggggctcccccagctccccagcagctgctacagcgtcgaccgggggaaaaggaagactggaaccttgggctccttggaggagccggcagggggcgcgagtgtgagcgctggcagccgggcagtcggagtggctggtgttgcgggggaggcgggcccacccccagagagggaaggcagtggttccactaagcccgggacccctggaaatagccctagctcccagcggctgccatcgaagagttccctcgatcccgctgtgaaccctgtccccaaacccaagcgcacctttgaatacgaggctgagaagaaccccaagagtaagcccagtaatggtctacctccttcacccacacctgctgctccacctcccttgccctccaccccagccccgccagtcacccggagacccaagaaggacatgcgtggtcaccgcaagtcccagagcagaaaatcctttgagtttgaggatgcatccagtctccagtccctgtacccctcttctcccactgagaatggtactgagaaccaacccaagtttggatccaaaagcactttagaagaaaatgcctatgaagatattgtgggagatctgcccaaggagaatccatatgaggatgtggacttaaagagccgaagagcaggacgaaaatcccagcaactgtctgagaactccttggactctttgcacaggatgtggagtcctcaggacaggaagtacaacagcccgcccacacagctttccctgaaacccaacagccagtccctgcgcagtgggaactggtcagaaaggaagagccaccggctgccacgattacccaagaggcacagccatgacgacatgctgctgctggctcagctgagtctgccgtcctcaccctccagcctcaatgaagacagcctcagcaccaccagcgagctgctgtccagccgccgggcccgccgcattcccaagcttgtccaaagaattaactccatctacaatgccaagagaggaaagaagagattaaaaaagttgtctatgtccagcattgaaacagcatcactgagagatgaaaacagtgagagcgagagcgactctgatgacaggttcaaagcccacacacagcgcctggtccacatccagtcgatgctgaagcgcgcccccagctatcgcacgctggagctggagctgctggagtggcaggagcgggagctttttgagtactttgtggtggtgtccctcaagaagaagccatcgcgaaacacctacctccccgaagtctcctaccagtttcccaagctggaccgacccaccaagcagatgcgagaggcagaggaaaggctcaaagccattccccagttttgcttccctgatgccaaggactggcttcctgtgtcagagtatagcagtgagaccttttctttcatgctgactggggaagatggcagcagacgctttggctactgcaggcgcttactgccaagtgggaaagggccccggttgccagaggtgtactgtgtcatcagccgccttggctgcttcggcttgttttccaaggtcctagatgaggtggagcgccggcgtgggatctccgctgcattggtctatcctttcatgagaagtctcatggagtcgcccttcccagccccagggaagaccatcaaagtgaagacattcctgccaggtgctggcaatgaggtgttagagctgcggcggcccatggactcaaggctggagcacgtggactttgagtgcctttttacctgcctcagtgtgcgccagctcatccgaatctttgcctcactgctgctggagcgccgggtcatttttgtggcagataagctcagtaccctctccagctgctcccacgcggtggtggccttgctctaccccttctcctggcagcacaccttcattcctgtcctcccggcctccatgattgacatcgtctgctgtcccacccccttcctggttggcctgctctccagctccctccccaaactgaaggagctgcctgtggaggaggcgctgatggtgaatctgggatctgaccgattcatccgacagatggacgacgaagacacgttgttacctaggaagttacaggcagctctggagcaggctctggagaggaagaatgagctgatctcccaggactctgacagcgactccgacgatgaatgtaataccctcaatgggctggtgtcggaggtgtttatccggttctttgtggagaccgttgggcactactccctctttctgacacagagtgagaagggagagagggcctttcagcgagaggccttccgcaaatctgtggcctccaaaagcatccgccgctttcttgaggtttttatggagtctcagatgtttgctggcttcatccaagacagggagctaagaaagtgtcgggcaaagggcctttttgagcagcgagtggagcagtacttagaagaactcccagacactgagcagagtggaatgaataagtttctccgaggtttgggcaacaaaatgaagtttctccacaagaagaattaagcctccttctcagtagcagagtccagtgccttgcagagcctgaagcctggggagaaggcccagcctgggaccctctgggctgctgtggctcctctgcccccacagatcctatcctccaagccagcccacctctgccttcatcatatcccaggatactgtttgtaaataatctgctgtaagctttcttaactgttttttgtaacaagcaaagagaatatggcaaatatttgtatattcccaaggggccgggtgctttcctgtcctgccagagcatggatgaagtttcgctgggtgctcgtgactggccagttttgtgcagctgactgtctcagccaaaccactgatcttccctggaggccttcggcctgcctgcctgcctgcctgaggtccccgctgccagtcccgggccctggagagcagatgctgtcttgttatgtacaggaggaccttttaaaaaaatcaagtttctattttttgctggtagtccgcatacccataccctctgtttttgaaaggcaaaggccaatcagtccccatttgtagcatggcaccagggtcttaggcctagtcctctcattcctcccaccctccgagatggtcagtgtgtcatgggaagcccacccccagctctgccagtgctctctgggcctggctcccagtcagtggtggccacgatgcggtacagggcatccctccttcccatctacgggtgttctcaataaacaatgtacagttgtttgggcccagag

SEQ ID NO: 313 - DNA, 3439 bp, Homo sapiens
gcgcccgcgcctcgggccgtcgggagcggagcctcctcgggaccaggacttcagggccacaggtgctgccaagatgctccagggcacctgctccgtgctcctgctctggggaatcctgggggccatccaggcccagcagcaggaggtcatctcgccggacactaccgagagaaacaacaactgcccagagaagaccgactgccccatccacgtgtacttcgtgctggacacctcggagagcgtcaccatgcagtcccccacggacatcctgctcttccacatgaagcagttcgtgccgcagttcatcagccagctgcagaacgagttctacctggaccaggtggcgctgagctggcgctacggcggcctgcacttctctgaccaggtggaggtgttcagcccaccgggcagcgaccgggcctccttcatcaagaacctgcagggcatcagctccttccgccgcggcaccttcaccgactgcgcgctggccaacatgacggagcagatccggcaggaccgcagcaagggcaccgtccacttcgccgtggtcatcaccgacggccacgtcaccggcagcccctgcgggggcatcaagctgcaggccgagcgggcccgcgaggagggcatccggctcttcgccgtggcccccaaccagaacctgaaggagcagggcctgcgggacatcgccagcacgccgcacgagctctaccgcaacgactacgccaccatgctgcccgactccaccgagatcaaccaggacaccatcaaccgcatcatcaaggtcatgaaacacgaagcctacggagagtgctacaaggtgagctgcctggaaatccctgggccctctgggcccaagggctaccgtggacagaagggtgccaagggcaacatgggtgagccgggagagcctggccagaagggaagacagggagacccgggcatcgaaggccccattggattcccaggacccaagggcgttcctggcttcaaaggagagaagggtgaatttggagccgacggtcgcaagggggcccctggcctggctggcaagaacgggaccgatggacagaagggcaagctggggcgcatcggacctcctggctgcaagggagaccctggaaaccggggccccgacggttacccgggggaagcagggagtccaggggagcgaggagaccaaggcggcaagggggaccctggccgcccaggacgcagagggcccccgggagaaatcggggccaagggaagcaaggggtatcaaggcaacaatggagccccaggaagtcctggtgtgaaaggagccaagggcgggcctgggccccgcggacccaaaggcgagccggggcgcaggggagaccccggcaccaagggcagcccaggcagcgatggccccaagggggagaagggggaccctggccctgagggcccccgcggcctggctggagaggttggcaacaaaggagccaagggagaccgaggcttgcctggacccagaggcccccagggagctcttggggagcccggaaagcagggatctcggggagaccccggtgatgcaggaccccgtggagactcaggacagccaggccccaagggagaccccggcaggcctggattcagctacccaggaccccgaggagcacccggagaaaaaggcgagcccggcccacgcggccccgagggaggccgaggcgactttggcttgaaaggagaacctgggaggaaaggagagaaaggagagcctgcggatcctggtccccctggtgagccaggccctcgggggccaagaggagtcccaggacccgagggtgagcccggcccccctggagaccccggtctcacggagtgtgacgtcatgacctacgtgagggagacctgcgggtgctgcgactgtgagaagcgctgtggcgccctggacgtggtcttcgtcatcgacagctccgagagcattgggtacaccaacttcacactggagaagaacttcgtcatcaacgtggtcaacaggctgggtgccatcgctaaggaccccaagtccgagacagggacgcgtgtgggcgtggtgcagtacagccacgagggcacctttgaggccatccagctggacgacgaacatatcgactccctgtcgagcttcaaggaggctgtcaagaacctcgagtggattgcgggcggcacctggacaccctcagccctcaagtttgcctacgaccgcctcatcaaggagagccggcgccagaagacacgtgtgtttgcggtggtcatcacggacgggcgccacgaccctcgggacgatgacctcaacttgcgggcgctgtgcgatcgcgacgtcacagtgacggccatcggcatcggggacatgttccacgagaagcacgagagtgaaaacctctactccatcgcctgcgacaagccacagcaggtgcgcaacatgacgctgttctccgacctggtcgctgagaagttcatcgatgacatggaggacgtcctctgcccggaccctcagatcgtgtgcccagaccttccctgccaaacagagctgtccgtggcacagtgcacgcagcggcccgtggacatcgtcttcctgctggacggctccgagcggctgggtgagcagaacttccacaaggcccggcgcttcgtggagcaggtggcgcggcggctgacgctggcccggagggacgacgaccctctcaacgcacgcgtggcgctgctgcagtttggtggccccggcgagcagcaggtggccttcccgctgagccacaacctcactgccatccacgaggcgctggagaccacacaatacctgaactccttctcgcacgtgggcgcaggcgtggtgcacgccatcaatgccatcgtgcgcagcccgcgtggcggggcccggaggcacgcagagctgtccttcgtgttcctcacggacggcgtcacgggcaacgacagtctgcacgagtcggcgcactccatgcgcaagcagaacgtggtacccaccgtgctggccttgggcagcgacgtggacatggacgtgctcaccacgctcagcctgggtgaccgcgccgccgtgttccacgagaaggactatgacagcctggcgcaacccggcttcttcgaccgcttcatccgctggatctgctagcgccgccgcccgggccccgcagtcgagggtcgtgagcccaccccgtccatggtgctaagcgggcccgggtcccacacggccagcaccgctgctcactcggacgacgccctgggcctgcacctctccagctcctcccacggggtccccgtagccccggcccccgcccagccccaggtctccccaggccctccgcaggctgcccggcctccctccccctgcagccatcccaaggctcctgacctacctggcccctgagctctggagcaagccctgacccaataaaggctttgaacccaaaaaaaaaaa

SEQ ID NO: 314 - DNA, 1600 bp, Homo sapiens
cggagcgaggcagcgcgcccggctcccgcgccatggggcggctggtggctgtgggcttgctggggatcgcgctggcgctcctgggcgagaggcttctggcactcagaaatcgacttaaagcctccagagaagtagaatctgtagaccttccacactgccacctgattaaaggaattgaagctggctctgaagatattgacatacttcccaatggtctggctttttttagtgtgggtctaaaattcccaggactccacagctttgcaccagataagcctggaggaatactaatgatggatctaaaagaagaaaaaccaagggcacgggaattaagaatcagtcgtgggtttgatttggcctcattcaatccacatggcatcagcactttcatagacaacgatgacacagtttatctctttgttgtaaaccacccagaattcaagaatacagtggaaatttttaaatttgaagaagcagaaaattctctgttgcatctgaaaacagtcaaacatgagcttcttccaagtgtgaatgacatcacagctgttggaccggcacatttctatgccacaaatgaccactacttctctgatcctttcttaaagtatttagaaacatacttgaacttacactgggcaaatgttgtttactacagtccaaatgaagttaaagtggtagcagaaggatttgattcagcaaatgggatcaatatttcacctgatgataagtatatctatgttgctgacatattggctcatgaaattcatgttttggaaaaacacactaatatgaatttaactcagttgaaggtacttgagctggatacactggtggataatttatctattgatccttcctcgggggacatctgggtagtctgtcatcctaatggccagaagctcttcgtgtatgacccgaacaatcctccctcgtcagaggttctccgcatccagaacattctatctgagaagcctacagtgactacagtttatgccaacaatgggtctgttctccaaggaagttctgtagcctcagtgtatgatgggaagctgctcataggcactttataccacagagccttgtattgtgaactctaaattgtacttttggcatgaaagtgcgataacttaacaattaattttctatgaaattgctaattctgagggaatttaaccagcaacattgacccagaaatgtatggcatgtgtagttaattttattccagtaaggaacggcccttttagttcttagagcacttttaacaaaaaaggaaaatgaacaggttctttaaaatgccaagcaagggacagaaaagaaagctgctttcgaataaagtgaatacattttgcacaaagtaagcctcacctttgccttccaactgccagaacatggattccactgaaatagagtgaattatatttccttaaaatgtgagtgacctcacttctggcactgtgactactatggctgtttagaactactgataataacgtattttgatgttttgtacttacatctttgtttaccattaaaaagttggagttatattaaagactaactaaaatcccaaaaaaaaaaaaaaaaaaaaaaaaaaaaaaaa

SEQ ID NO: 315 - DNA, 679 bp, Homo sapiens
gaattcggcacgaggtagcttctctcagcctagcccagcatcactatggtggacgctttcctgggcacctggaagctagtggacagcaagaatttcgatgactacatgaagtcactcggtgtgggttttgctaccaggcaggtggccagcatgaccaagcctaccacaatcatcgaaaagaatggggacattctcaccctaaaaacacacagcaccttcaagaacacagagatcagctttaagttgggggtggagttcgatgagacaacagcagatgacaggaaggtcaagtccattgtgacactggatggagggaaacttgttcacctgcagaaatgggacgggcaagagaccacacttgtgcgggagctaattgatggaaaactcatcctgacactcacccacggcactgcagtttgcactcgcacttacgagaaagaggcatgacctgactgcactgttgctgactactactctgccaatcggctacccctcgactagcaccacattgcctcatttcttcctctgattttgtacaaatccacgaattcttctggggtcaggtgccactgaccgggatccagttccagttcccatggtgtatgtggttttttttttttttttttttaactgcactcatagggtgctctgaggtcaataaagcagagccaaggccacc

SEQ ID NO: 316 - DNA, 3254 bp, Homo sapiens
agagttgcactgagtgtggctgaagcagcgaggcgggagtggaggtgcgcggagtcaggcagacagacagacacagccagccagccaggtcggcagtatagtccgaactgcaaatcttattttcttttcaccttctctctaactgcccagagctagcgcctgtggctcccgggctggtggttcgggagtgtccagagagccttgtctccagccggccccgggaggagagccctgctgcccaggcgctgttgacagcggcggaaagcagcggtaccccacgcgcccgccgggggacgtcggcgagcggctgcagcagcaaagaactttcccggcggggaggaccggagacaagtggcagagtcccggagcgaacttttgcaagcctttcctgcgtcttaggcttctccacggcggtaaagaccagaaggcggcggagagccacgcaagagaagaaggacgtgcgctcagcttcgctcgcaccggttgttgaacttgggcgagcgcgagccgcggctgccgggcgccccctccccctagcagcggaggaggggacaagtcgtcggagtccgggcggccaagacccgccgccggccggccactgcagggtccgcactgatccgctccgcggggagagccgctgctctgggaagtgagttcgcctgcggactccgaggaaccgctgcgcccgaagagcgctcagtgagtgaccgcgacttttcaaagccgggtagcgcgcgcgagtcgacaagtaagagtgcgggaggcatcttaattaaccctgcgctccctggagcgagctggtgaggagggcgcagcggggacgacagccagcgggtgcgtgcgctcttagagaaactttccctgtcaaaggctccggggggcgcgggtgtcccccgcttgccagagccctgttgcggccccgaaacttgtgcgcgcacgccaaactaacctcacgtgaagtgacggactgttctatgactgcaaagatggaaacgaccttctatgacgatgccctcaacgcctcgttcctcccgtccgagagcggaccttatggctacagtaaccccaagatcctgaaacagagcatgaccctgaacctggccgacccagtggggagcctgaagccgcacctccgcgccaagaactcggacctcctcacctcgcccgacgtggggctgctcaagctggcgtcgcccgagctggagcgcctgataatccagtccagcaacgggcacatcaccaccacgccgacccccacccagttcctgtgccccaagaacgtgacagatgagcaggaggggttcgccgagggcttcgtgcgcgccctggccgaactgcacagccagaacacgctgcccagcgtcacgtcggcggcgcagccggtcaacggggcaggcatggtggctcccgcggtagcctcggtggcagggggcagcggcagcggcggcttcagcgccagcctgcacagcgagccgccggtctacgcaaacctcagcaacttcaacccaggcgcgctgagcagcggcggcggggcgccctcctacggcgcggccggcctggcctttcccgcgcaaccccagcagcagcagcagccgccgcaccacctgccccagcagatgcccgtgcagcacccgcggctgcaggccctgaaggaggagcctcagacagtgcccgagatgcccggcgagacaccgcccctgtcccccatcgacatggagtcccaggagcggatcaaggcggagaggaagcgcatgaggaaccgcatcgctgcctccaagtgccgaaaaaggaagctggagagaatcgcccggctggaggaaaaagtgaaaaccttgaaagctcagaactcggagctggcgtccacggccaacatgctcagggaacaggtggcacagcttaaacagaaagtcatgaaccacgttaacagtgggtgccaactcatgctaacgcagcagttgcaaacattttgaagagagaccgtcgggggctgaggggcaacgaagaaaaaaaataacacagagagacagacttgagaacttgacaagttgcgacggagagaaaaaagaagtgtccgagaactaaagccaagggtatccaagttggactgggttcggtctgacggcgcccccagtgtgcacgagtgggaaggacttggtcgcgccctcccttggcgtggagccagggagcggccgcctgcgggctgccccgctttgcggacgggctgtccccgcgcgaacggaacgttggactttcgttaacattgaccaagaactgcatggacctaacattcgatctcattcagtattaaaggggggagggggagggggttacaaactgcaatagagactgtagattgcttctgtagtactccttaagaacacaaagcggggggagggttggggaggggcggcaggagggaggtttgtgagagcgaggctgagcctacagatgaactctttctggcctgctttcgttaactgtgtatgtacatatatatattttttaatttgattaaagctgattactgtcaataaacagcttcatgcctttgtaagttatttcttgtttgtttgtttgggtatcctgcccagtgttgtttgtaaataagagatttggagcactctgagtttaccatttgtaataaagtatataatttttttatgttttgtttctgaaaattccagaaaggatatttaagaaaatacaataaactattggaaagtactcccctaacctcttttctgcatcatctgtagatcctagtctatctaggtggagttgaaagagttaagaatgctcgataaaatcactctcagtgcttcttactattaagcagtaaaaactgttctctattagacttagaaataaatgtacctgatgtacctgatgctatgtcaggcttcatactccacgctcccccagcgtatctatatggaattgcttaccaaaggctagtgcgatgtttcaggaggctggaggaaggggggttgcagtggagagggacagcccactgagaagtcaaacatttcaaagtttggattgcatcaagtggcatgtgctgtgaccatttataatgttagaaattttacaataggtgcttattctcaaagcaggaattggtggcagattttacaaaagatgtatccttccaatttggaatcttctctttgacaattcctagataaaaagatggcctttgtcttatgaatatttataacagcattctgtcacaataaatgtattcaaataccaat

SEQ ID NO: 317 - DNA, 5958 bp, Homo sapiens
  misc_feature (49)..(49): N may be C, G, T or A
cagccgccggcgagcgcgccgagacgccgaacaggtggccggagcgtgncgggcgccgcggcggggcgaggcgaggcaagccccgggcgaacgaggcgaggcgagggcggccgggccgggcatgcgagctgagcggccccccggcgtcgccgccgcctgcccgcgcccctagccgcccgcgcgcccgagtccccagcggctcctccgcgcccagcgtcctcggtcccggcctcggctgctccggctgcgctcggcgaggggcgcgggcccgcccgcggcgcggcggcatgaaagtgaccgtgtgcttcggacggacccgggtggtcgtgccgtgcggggacggccacatgaaagttttcagcctcatccagcaggcggtgacccgctaccggaaggccatcgccaaggatccaaactactggatacaggtgcatcgcttggaacatggagatggaggaatactagaccttgatgacattctttgtgatgtagcagacgataaagacagactggtagcagtgtttgatgagcaggatccacatcacggaggtgatggcaccagtgccagttccacgggtacccagagcccagagatatttggtagtgagcttggcaccaacaatgtctcagcctttcagccttaccaagcaacaagtgaaattgaggtcacaccttcagtccttcgagcaaatatgcctcttcatgttcgacgcagtagtgacccagctctaattggcctctccacttctgtcagtgatagtaatttttcctctgaagagccttcaaggaaaaatcccacacgctggtcaacaacagctggcttcctcaagcagaacactgctgggagtcctaaaacctgcgacaggaagaaagatgaaaactacagaagcctcccgcgggatactagtaactggtctaaccaatttcagagagacaatgctcgctcgtctctgagtgccagtcacccaatggtgggcaagtggctggagaaacaagaacaggatgaggatgggacagaagaggataacagtcgtgttgaacctgttggacatgctgacacgggtttggagcatatacccaacttttctctggatgatatggtaaagctcgtagaagtccccaacgatggagggcctctgggaatccatgtagtgcctttcagtgctcgaggcggcagaaccctggggttattagtaaaacgattggagaaaggtggtaaagctgaacatgaaaatctttttcgtgagaatgattgcattgtcaggattaatgatggcgaccttcgaaatagaagatttgaacaagcacaacatatgtttcgccaagccatgcgtacacccatcatttggttccatgtggttcctgcagcaaataaagagcagtatgaacaactatcccaaagtgagaagaacaattactattcaagccgttttagccctgacagccagtatattgacaacaggagtgtgaacagtgcagggcttcacacggtgcagagagcaccccgactgaaccacccgcctgagcagatagactctcactcaagactacctcatagcgcacacccctcgggaaaaccaccatccgctccagcctcggcacctcagaatgtatttagtacgactgtaagcagtggttataacaccaaaaaaataggcaagaggcttaatatccagcttaagaaaggtacagaaggtttgggattcagcatcacttccagagatgtaacaataggtggctcagctccaatctatgtgaaaaacattctcccccggggggcggccattcaggatggccgacttaaggcaggagacagacttatagaggtaaatggagtagatttagtgggcaaatcccaagaggaagttgtttcgctgttgagaagcaccaagatggaaggaactgtgagccttctggtctttcgccaggaagacgccttccacccaagggaactgaatgcagagccaagccagatgcagattccaaaagaaacgaaagcagaagatgaggatattgttcttacacctgatggcaccagggaatttctgacatttgaagtcccacttaatgattcaggatctgcaggccttggtgtcagtgtcaaaggtaaccggtcaaaagagaaccacgcagatttgggaatctttgtcaagtccattattaatggaggagcagcatctaaagatggaaggcttcgggtgaatgatcaactgatagcagtaaatggagaatccctgttgggcaagacaaaccaagatgccatggaaaccctaagaaggtctatgtctactgaaggcaataaacgaggaatgatccagcttattgttgcaaggagaataagcaagtgcaatgagctgaagtcacctgggagcccccctggacctgagctgcccattgaaacagcgttggatgatagagaacgaagaatttcccattccctctacagtgggattgaggggcttgatgaatcgcccagcagaaatgctgccctcagtaggataatgggtaaataccagctgtcccctacagtgaatatgccccaagatgacactgtcattatagaagatgacaggttgccagtgcttcctccacatctctctgaccagtcctcttccagctcccatgatgatgtggggtttgtgacggcagatgctggtacttgggccaaggctgcaatcagtgattcagccgactgctctttgagtccagatgttgatccagttcttgcttttcaacgagaaggatttggacgtcagagtatgtcagaaaaacgcacaaagcaattttcagatgccagtcaattggatttcgttaaaacacgaaaatcaaaaagcatggatttaggtatagctgacgagactaaactcaatacagtggatgaccagaaagcaggttctcccagcagagatgtgggtccttccctgggtctgaagaagtcaagctcattggagagtctgcagaccgcagttgccgaggtgactttgaatggggatattcctttccatcgtccacggccgcggataatcagaggcaggggatgcaatgagagcttcagagctgccatcgacaaatcttatgataaacccgcggtagatgatgatgatgaaggcatggagaccttggaagaagacacagaagaaagttcaagatcagggagagagtctgtatccacagccagtgatcagccttcccactctctggagagacaaatgaatggaaaccaagagaaaggtgataagactgatagaaaaaaggataaaactggaaaagaaaagaagaaagatagagataaggagaaggataaaatgaaagccaagaagggaatgctgaagggcttgggagacatgttcaggtttggcaaacatcgaaaagatgacaagattgagaaaacgggtaaaataaaaatacaggaatcctttacatcagaagaggagaggatacgaatgaagcaggagcaggagaggattcaagccaaaactcgagaatttagggaacgacaagctcgagagcgtgactatgctgaaattcaagattttcatcggacatttggctgtgatgatgagttaatgtatgggggagtttcttcttatgaaggttccatggctctcaacgctagacctcagagcccacgagaagggcatatgatggatgctttgtatgcccaagtcaagaagccgcggaattccaaaccctcacctgtagacagtaacagatcaactcctagcaatcatgatcggatacagcgtctgaggcaagaatttcagcaagcaaagcaagatgaagatgtagaagatcgtcggcggacctatagttttgagcaaccctggccgaacgcacggccggcgacgcagagcgggcgacactcggtgtccgtggaggtgcagatgcagcggcagcgccaggaggagcgcgagagctcccagcaggcccagcgccagtacagctctctgcctcggcaaagcaggaaaaatgccagctcggtctcccaggactcttgggagcagaactactcccctggggaaggcttccagagtgccaaagagaaccccaggtactccagctaccaaggctccaggaacggctacctgggaggacatggcttcaacgccagggtcatgctggaaactcaggagctccttcgccaggaacagaggcggaaggagcagcagatgaagaagcagcctccttccgaggggcccagcaactatgactcgtataagaaagtccaggaccccagttacgcccctcccaaggggcccttccggcaagatgtgcccccctccccttctcaggttgcgaggctgaacagacttcagactcctgagaaagggaggcccttctattcctgagcacgcaaataacggatgcttcatgtcgcgcaataaaagacattttcctatgaagacttgtattttgggagtttttttaaaacctcgatggtactatggagtatttctgttgttggtatcagtgcctttaagcggtgtaggcaaagaaatggaaggccttaatgtctttgccactatgtctcaagtgtctgtttcatggaaggatttcccaccctgtgacaatcatctgtttgaggtgttcatatgctctgcgcctctccacagtaccaggaatctcggccctactcatgagttgtccgcggcttggttgtaacatccctgcaccacttgcagtgacaaattcacctgaagtggaggatgacgtgcggccctgtttctccctctaagttctcttagctatgggatgacatcttagtctctggtggaggaaaagtgggcgacatacaccaaaaattggggctttctggtacttcacagcacagccatttgtcgtactttgtcatcactgtggttttctctttcctttctcagctctttgtgacgggagagtcggtcatcctattacagaagctaagccatagtccaacattgtttggtcaccatgggggtccttttgtaactgccttatgactcaacattaccaataaagtgatgatcctggtctgcgtttatacatacgcttgttcggtcctgttcctgacacgtgggttgagtcaccacagctctgtgtggggaacgtgggagacaggagtggctcctgccgggggaagctgggcctgccattggccctgtgtctatcatgaggggagagctaagaaagaaattctcctaggaagagctcatggcccagtacatcctagtaattattttaattagtttttgttctgacagcttgtcaggaagggcacagaatgggacagagataaaccagacagtcattttgatctgctctctacggtttttcaagtcagaggcaattgatgcttgtctaatgcatccacacactgcatgtctgacttggcgatgccacgctcctaagtagttctgccatgaaacataaaagacaaaggaaaagccgttacacatcacacagagaacattttcgggtcccacagcggtggtggcaggaagctcactctcgcgtcagtattagagtgtgtgtgtgggtctcggggatctcggtggctcccatcttccttcattgttctgaacatcctgtattgtaaaccatggctggggtgctaaagtgcctgtgaatcccgatgtggaaaaagctggaggtgaaagctcagcataccatgtatttactttaaaaacagaaaaaaagacatgtatggatatgtctattttttttttattggcacattgtatttttgtgttgacttgtttttagaaatgatgtgtccacacacgtacccgtgtctcttctgcatttctgtgtcatggttctgtttcttaatcacgtgcggcggtgtctaagtggtgttaccagtgtacgcgcagtgaccttggatgacagtggctctttctcacagcctcccctgagctgtgagaaacagctttctctgtacatatgcaactcctaataaaaggcatatttcttcctgtt

SEQ ID NO: 318 - DNA, 4164 bp, Homo sapiens
cactctggctgggagcagaaggcagcctcggtctctgggcggcggcggcggccctctctgccctggccgcgctgtgtggtgaccgcaggcccgagacatgagggcggcccgtgctctgctgcccctgctgctgcaggcctgctggacagccgcgcaggatgagccggagaccccgagggccgtggccttccaggactgccccgtggacctgttctttgtgctggacacctctgagagcgtggccctgaggctgaagccctacggggccctcgtggacaaagtcaagtccttcaccaagcgcttcatcgacaacctgagggacaggtactaccgctgtgaccgaaacctggtgtggaacgcaggcgcgctgcactacagtgacgaggtggagatcatccaaggcctcacgcgcatgcctggcggccgcgacgcactcaaaagcagcgtggacgcggtcaagtactttgggaagggcacctacaccgactgcgctatcaagaaggggctggagcagctcctcgtggggggctcccacctgaaggagaataagtacctgattgtggtgaccgacgggcaccccctggagggctacaaggaaccctgtggggggctggaggatgctgtgaacgaggccaagcacctgggcgtcaaagtcttctcggtggccatcacacccgaccacctggagccgcgtctgagcatcatcgccacggaccacacgtaccggcgcaacttcacggcggctgactggggccagagccgcgacgcagaggaggccatcagccagaccatcgacaccatcgtggacatgatcaaaaataacgttgagcaagtgtgctgctccttcgaatgccagcctgcaagaggacctccgggcctccggggcgaccccggctttgagggagaacgaggcaagccggggctcccaggagagaagggagaagccggagatcctggaagacccggggacctcggacctgttgggtaccagggaatgaagggagaaaaagggagccgtggggagaagggctccaggggaccaaagggctacaagggagagaagggcaagcgtggcatcgacggggtggacggcgtgaagggggagatggggtacccaggcctgccaggctgcaagggctcgccgggttttgacggcattcaaggaccccctggccccaagggagaccccggcgcctttggactgaaaggagaaaagggcgagcctggagctgacggggaggccgggagaccaggagctcggggaccatctggagacgaggggccagccggagagcctgggccccccggagagaaaggagaggcgggcgacgaggggaacccaggacctgacggtgcccccggggagcggggtggccctggagagagaggaccacgggggaccccaggcccgcggggaccaagaggagaccctggtgaagctggcccgcagggtgatcagggaagagaagggcccgttggtgtccctggagacccgggcgaggctggccctatcggacctaaaggctaccgaggcgatgagggtcccccagggtccgagggtgccagaggagccccaggacctgccggaccccctggagacccggggctgatgggagaaaggggagaagacggccccgctggaaatggcaccgagggcttccccggcttccccgggtatcccgggaacaggggcgctcccgggataaacggcacgaagggctaccccggcctcaagggggacgagggagaagccggggaccccggagacgataacaacgacattgcaccccgaggagtcaaaggagcaaaggggtaccggggtcccgagggcccccagggacccccaggacaccaaggaccgcctgggccggacgaatgcgagattttggacatcatcatgaaaatgtgctcttgctgtgaatgcaagtgcggccccatcgacctcctgttcgtgctggacagctcagagagcattggcctgcagaacttcgagattgccaaggacttcgtcgtcaaggtcatcgaccggctgagccgggacgagctggtcaagttcgagccagggcagtcgtacgcgggtgtggtgcagtacagccacagccagatgcaggagcacgtgagcctgcgcagccccagcatccggaacgtgcaggagctcaaggaagccatcaagagcctgcagtggatggcgggcggcaccttcacgggggaggccctgcagtacacgcgggaccagctgctgccgcccagcccgaacaaccgcatcgccctggtcatcactgacgggcgctcagacactcagagggacaccacaccgctcaacgtgctctgcagccccggcatccaggtggtctccgtgggcatcaaagacgtgtttgacttcatcccaggctcagaccagctcaatgtcatttcttgccaaggcctggcaccatcccagggccggcccggcctctcgctggtcaaggagaactatgcagagctgctggaggatgccttcctgaagaatgtcaccgcccagatctgcatagacaagaagtgtccagattacacctgccccatcacgttctcctccccggctgacatcaccatcctgctggacggctccgccagcgtgggcagccacaactttgacaccaccaagcgcttcgccaagcgcctggccgagcgcttcctcacagcgggcaggacggaccccgcccacgacgtgcgggtggcggtggtgcagtacagcggcacgggccagcagcgcccagagcgggcgtcgctgcagttcctgcagaactacacggccctggccagtgccgtcgatgccatggactttatcaacgacgccaccgacgtcaacgatgccctgggctatgtgacccgcttctaccgcgaggcctcgtccggcgctgccaagaagaggctgctgctcttctcagatggcaactcgcagggcgccacgcccgctgccatcgagaaggccgtgcaggaagcccagcgggcaggcatcgagatcttcgtggtggtcgtgggccgccaggtgaatgagccccacatccgcgtcctggtcaccggcaagacggccgagtacgacgtggcctacggcgagagccacctgttccgtgtccccagctaccaggccctgctccgcggtgtcttccaccagacagtctccaggaaggtggcgctgggctagcccaccctgcacgccggcaccaaaccctgtcctcccacccctccccactcatcactaaacagagcccaagcttggaaagccaggacacaacgctgctgcctgctttgtgcagggtcctccggggctcagccctgagttggcatcacctgcgcagggccctctggggctcagctctgagctagtgtcacctgcacagggccctctgaggctcagccctgagctggcgtcacctgtgcagggccctctggggctcagccctgagctggcctcacctgggttccccaccccgggctctcctgccctgccctcctgcccgccctccctcctgcctgcgcagctccttccctaggcacctctgtgctgcatcccaccagcctgagcaagacgcctctcggggcctgtgccgcactagcctccctctcctctgtccccatagctggtttttcccaccaatcctcacctaacagttactttacaattaaactcaaagcaagctcttctcctcagcttggggcagccattggcctctgtctcgttttgggaaaccaaggtcaggaggccgttgcagacataaatctcggcgactcggccccgtctcctgagggtcctgctggtgaccggcctggaccttggccctacagccctggaggccgctgctgaccagcactgaccccgacctcagagagtactcgcaggggcgctggctgcactcaagaccctcgagattaacggtgctaaccccgtctgctcctccctcccgcagagactggggcctggactggacatgagagccccttggtgccacagagggctgtgtcttactagaaacaacgcaaacctctccttcctcagaatagtgatgtgttcgacgttttatcaaaggccccctttctatgttcatgttagttttgctccttctgtgtttttttctgaaccatatccatgttgctgacttttccaaataaaggttttcactcctc

SEQ ID NO: 319 - DNA, 3615 bp, Homo sapiens
ggactgtgtgtgtctggctgtagcagacgcgaggcggcgacgaggcgccggggacccgcgcgaggggcggccgggaggcggcggcggcggccgccagaagtagcagcaggaccggcggcggcgacggcagccctgaaatgcattttcctctccagcggccatgttaaccaggaaaccttcggccgccgctcccgccgcctacccgaccggccgaggtggggacagcgccgttcgtcagcttcaggcttccccggggctcggtgcagggcccacccggagcggagtggggactggcccgccctcccccatcgccctgccgcctctccgggccagcaacgctgccgccgcagcccacacgattggcggcagtaagcacacaatgaatgatcacctgcatgtcggcagccacgctcacggacagatccaggttcaacagttgtttgaggataacagtaacaagcggacagtgctcacgacacaaccaaatgggcttacaacagtgggcaaaacgggcttgccagtggtgccagagcggcagctggacagcattcatagacggcaggggagctccacctctctaaagtccatggaaggcatggggaaggtgaaagccacccccatgacacctgaacaagcaatgaagcaatacatgcaaaaactcacagccttcgaacaccatgagattttcagctaccctgaaatatatttcttgggtctaaatgctaagaagcgccagggcatgacaggtgggcccaacaatggtggctatgatgatgaccagggatcatatgtgcaggtgccccacgatcacgtggcttacaggtatgaggtcctcaaggtcattgggaaggggagctttgggcaggtggtcaaggcctacgatcacaaagtccaccagcacgtggccctaaagatggtgcggaatgagaagcgcttccaccggcaagcagcggaggagatccgaatcctggaacacctgcggaagcaggacaaggataacacaatgaatgtcatccatatgctggagaatttcaccttccgcaaccacatctgcatgacgtttgagctgctgagcatgaacctctatgagctcatcaagaagaataaattccagggcttcagtctgcctttggttcgcaagtttgcccactcgattctgcagtgcttggatgctttgcacaaaaacagaataattcactgtgaccttaagcccgagaacattttgttaaagcagcagggtagaagcggtattaaagtaattgattttggctccagttgttacgagcatcagcgtgtctacacgtacatccagtcgcgtttttaccgggctccagaagtgatccttggggccaggtatggcatgcccattgatatgtggagcctgggctgcattttagcagagctcctgacgggttaccccctcttgcctggggaagatgaaggggaccagctggcctgtatgattgaactgttgggcatgccctcacagaaactgctggatgcatccaaacgagccaaaaattttgtgagctccaagggttatccccgttactgcactgtcacgactctctcagatggctctgtggtcctaaacggaggccgttcccggagggggaaactgaggggcccaccggagagcagagagtgggggaacgcgctgaaggggtgtgatgatccccttttccttgacttcttaaaacagtgtttagagtgggatcctgcagtgcgcatgaccccaggccaggctttgcggcacccctggctgaggaggcggttgccaaagcctcccaccggggagaaaacgtcagtgaaaaggataactgagagcaccggtgctatcacatctatatccaagttacctccaccttctagctcagcttccaaactgaggactaatttggcgcagatgacagatgccaatgggaatattcagcagaggacagtgttgccaaaacttgttagctgagctcacgtcccctgatgctggtaacctgaaagatacgacattgctgagccttactgggttgaaaaggagtagctcagacctgtttttatttgctcaataactctactcatttgtatcttttcagcacttaattttaatgtaagaaagttgttcattttgtttttataaaatacatgaggacaatgctttaagtttttatactttcagaaactttttgtgttctaaaagtacaatgagccttactgtatttagtgtggcagaataataacatcagtggcaggccactgattacttcatgactgccacgcatttacagattggtgtcaaagacattcactatgtttttatggttcatgttatatcctccccagggtgacagccccttaaggccctccttttccctccatgctccaggtccatgcacaggtgtagcatgtcctgcttccgtttttcataaattaatctgggtgttgggggtagtgggaggagaacggtcagaatcaaagtgacattctaagaaaaactgtaccttagagattttcctctagtgctcaaacaaatacaaaataagatccccaaggtttaaactgcccagttagcattctgacattctaaaagccggcaaagcagcttttagtggataaatgggaatggaaacgtgtgtgttcctccaaattttctagtatgatcggtgagctgttttgtaaagaagcctcatattacagagttgcttttgcacctaaatttagaattgtattccatgaactgttcctcccttttctctgcttttctcctctctgttcctcttttaataccacacgtctgttgcttgcatttagtttgtcttcttccttcagctgtgtatcccagactgttaatacagaaaagagacatttcagctgtgattatgaccattgtttcatattccaattaaaaaaagaacagcagcctagctacttaaggtggggatttcatagttccaaagaagatttagcagattagagtgagttcacacttttcaggtgccactgtaaggttctctcagcctgggaaactatcaactctttctttaaaaagaaagagggttgaaaatcctctggacgaacagaagtcactttggctgttcagtaaggccaatgttaacaacacgtttagaggaggaaaagttcaacctcaagttaaatggtttgacttattcttcgtatcattagaagaaccccagagatagcattcctctattttattttactttcttttggattgcactgattgtttttgtgggaatgacactttatctggcaaagtaactgagagtttggtaaaagaatattttcttctctgaataataattattttcacagtgaaaatttcagtattttatcactaatgtatgagcaatgatctatatcaatttcaaggcacgtgaaaaaaattttttagtatgtgcaatttaatatagaaagatttctgcctgtttggacaataggttttgggtagtacagattaggataagtaagcttatatatgcacagagattattgtattacctgtaaattgatttacaagtacttaaaagcgtggtccccagtgaggccaagaaagtttccggttaagttctttaataataatcctacagtttatcttaagaa

SEQ ID NO: 320 - DNA, 2129 bp, Homo sapiens
ggcacgagggctgcccgggctgcgcggcgtctgcaggcgccaccgctgcctctttccggctgtgaccctcctcgccggcgccgcttggctgcgtcctccgactccccgcgccgccgagaccaggctcccgctccggttgcggccgcaccgccctccgcggccgccccctggggatccagcgagcgcggtcgtccttggtggaaggaaccatgaactggcatctccccctcttcctcttggcctctgtgacgctgccttccatctgctcccacttcaatcctctgtctctcgaggaactaggctccaacacggggatccaggttttcaatcagattgtgaagtcgaggcctcatgacaacatcgtgatctctccccatgggattgcgtcggtcctggggatgcttcagctgggggcggacggcaggaccaagaagcagctcgccatggtgatgagatacggcgtaaatggagttggtaaaatattaaagaagatcaacaaggccatcgtctccaagaagaataaagacattgtgacagtggctaacgccgtgtttgttaagaatgcctctgaaattgaagtgccttttgttacaaggaacaaagatgtgttccagtgtgaggtccggaatgtgaactttgaggatccagcctctgcctgtgattccatcaatgcatgggttaaaaatgaaaccagggatatgattgacaatctgctgtccccagatcttattgatggtgtgctcaccagactggtcctcgtcaacgcagtgtatttcaagggtctgtggaaatcacggttccaacccgagaacacaaagaaacgcactttcgtggcagccgacgggaaatcctatcaagtgccaatgctggcccagctctccgtgttccggtgtgggtcgacaagtgcccccaatgatttatggtacaacttcattgaactgccctaccacggggaaagcatcagcatgctgattgcactgccgactgagagctccactccgctgtctgccatcatcccacacatcagcaccaagaccatagacagctggatgagcatcatggtgcccaagagggtgcaggtgatcctgcccaagttcacagctgtagcacaaacagatttgaaggagccgctgaaagttcttggcattactgacatgtttgattcatcaaaggcaaattttgcaaaaataacaacagggtcagaaaacctccatgtttctcatatcttgcaaaaagcaaaaattgaagtcagtgaagatggaaccaaagcttcagcagcaacaactgcaattctcattgcaagatcatcgcctccctggtttatagtagacagaccttttctgtttttcatccgacataatcctacaggtgctgtgttattcatggggcagataaacaaaccctgaagagtatacaaaagaaaccatgcaaagcaacgactactttgctacgaagaaagactcctttcctgcatctttcatagttctgttaaatatttttgtacatcgcttctttttcaaaactagttcttaggaacagactcgatgcaagtgtttctgttctgggaggtattggagggaaaaaacagcaggatggctggaacactgtactgaggaatgaatagaaaggcttccagatgtctaaaagattctttaaactactgaactgttacctaggttaacaaccctgttgagtatttgctgtttgtccagttcaggaatttttgttttgttttgtctatatgtgcggcttttcagaagaaatttaatcagtgtgacagaaaaaaaaaatgttttatggtagcttttactttttatgaaaaaaaaattatttgccttttaaattcttttcccccatccccctccaaagtcttgatagcaagcgttattttgggggtagaaacggtgaaatctctagcctctttgtgtttttgttgttgttgttgttgttgttttatataatgcatgtattcactaaaataaaatttaaaaaactcctgtcttgctagacaaggttgctgttgtgcagtgtgcctgtcactactggtctgtactccttggatttgcatttttgtattttgtacaaagtaaaaataaactgttatgagtagtaaaaaaaaaaaaaaaaaa

SEQ ID NO: 321 - DNA, 4234 bp, Homo sapiens
gcccatgagcgcgccgcggcccgggctggcgtgcgggtgcggctgcggcggccgcgcggcggggccccgggaggcgggtcgctgagcggggcgcgcggccccgaggatgcgggagcgggagcgggagcagcgctggcgtcaatgctcccttcctcgggccattggagactccgttgctttttaatggcggcagcggctgctgggtgagcagctggaggccggacagtgttcgtcccatccggagaggatcgctttctcctggcgtcaccagcgctgggttggtgggggtagcttttccctctttgctcctccattcttgaagaaagaagaagatgccactgccatttgggttgaaactgaaacgcacccggcgctacacggtgtccagcaagagttgcctggttgcccggatccaactgcttaataacgagtttgtggagttcaccctgtccgtggagagcactggccaggaaagcctcgaggccgtggcccagaggctggagctgcgggaggtcacttacttcagcctctggtactacaacaagcaaaatcagcgccggtgggtagatttggaaaaacctttgaagaagcagctggataaatatgcattggaacctaccgtctattttggagtggtgttttatgtgccttcagtttctcagctgcagcaggagattaccaggtatcagtattatctgcaactgaagaaagatatcttggaaggaagtattccttgtaccttagaacaagcaattcagctagcaggcttagctgttcaagcggattttggtgactttgatcagtatgaatcccaggactttcttcagaaatttgccttgtttcctgtgggatggttacaagatgaaaaagtattggaagaagcaacccaaaaagtggccttactacatcagaaatacagagggctcacagctcctgatgctgaaatgctgtacatgcaggaggtagagagaatggatggctatggagaagagagctaccctgctaaggatagccaaggaagtgacatatccattggagcgtgtcttgaaggtatctttgtgaaacacaagaatggaaggcatcctgtggtatttaggtggcatgacattgccaacatgtcccacaacaagtccttttttgcattagagctggcaaataaagaggagaccattcaatttcaaactgaagacatggaaacagcaaaatacatttggagactctgtgttgcgcgacacaagttttacagactaaaccagtgtaacctgcaaactcagactgtcacagtgaacccaatcaggaggaggtcttcttcaaggatgtctctgcctaaaccccagccctacgtgatgcctcccccaccgcagttgcactataatggacattatacagaaccatatgcttcttcccaagataacctctttgtgcccaaccagaacggatactactgtcactctcagacaagcttggatagagcccagattgacttcaacggtcggatccgtaatggcagtgtctacagtgcacacagcaccaactccttaaataatcctcagccctacttgcagccctcgccgatgtcgtccaaccctagcatcaccgggagtgacgtcatgaggcctgactacctcccgtcccatcggcacagcgccgtgatacccccgtcctaccgccccaccccagactatgagactgtgatgaagcagctcaacaggggcctggtgcatgcggaacggcagagccactcgctgcgaaacctcaacatcggcagctcgtacgcctacagcaggcccgcggcgctggtctacagccagcccgagatccgcgagcacgcacagctcccctcgccagcggccgcacactgcccgttcagcctgagctacagcttccacagcccgtctccctacccctaccctgccgagcggcggcccgtggtgggcgcggtcagcgtgccggagctgaccaatgcgcagctgcaggcgcaggactacccgtctcccaacatcatgcggacgcaggtgtaccggccacccccaccctacccgccccccaggcccgccaacagcacgccagacctgtcccgccacctttacatcagcagcagcaaccccgacctcatcacgcggcgcgtgcaccactcggtgcaaacgttccaggaggacagcctgcccgtggcgcactcgctgcaggaggtcagcgagcccctcaccgccgcgcgccacgcgcagctgcacaaacggaacagcatcgaggtggccgggctcagccacggcctggagggcctgcggctcaaggagcgcaccctatccgcgtcggcggcagaggtggcgccgcgagccgtctcggtgggctcccagcccagcgttttcaccgagaggacacagcgagaagggccggaggaggcggagggcttgaggtacggccataagaagtccctgtcggacgccaccatgctaatccacagcagcgaggaggaggaggacgaggacttcgaggaggagagcggggcccgggcgccccctgcacgtgcgcgcgagcctcggcccggcctggcccaggacccacctggctgccctcgcgtcctgctcgccgggcccctgcacatcctggagcccaaggcccacgtcccagacgcggagaagaggatgatggacagcagccccgtccgcacgaccgcagaggcccagcggccctggagagacgggctgctgatgccctccatgtcggagtccgacctcaccacgtcaggccgctaccgagcccggagggactctctgaagaaaaggccggtgtcggaccttctctctgggaagaagaacatcgtggaagggctcccgcctctagggggaatgaaaaagactcgagtagatgcaaaaaaaattggtcctcttaaactggctgccctaaatggactctccctatctcgagtgcctctgcctgatgaaggaaaggaagtggctaccagagcaacgaatgatgaaaggtgtaaaattctggaacaacgattagaacaaggaatggtattcacagaatatgaaagaattcttaagaaacggctagttgatggggagtgctcaacagcacgactccctgaaaatgcagaaagaaatcgattccaagatgttcttccttatgatgatgcgagagtggagttggtcccaactaaagaaaacaacactggttacatcaacgcatcacatattaaggtctctgtcagtggaatcgaatgggattatattgccacacagggaccattacagaatacctgtcaagatttttggcagatggtatgggaacagggaattgcaattatagcaatggtgacagcagaagaggagggtggaagggagaagagctttaggtactggccacgacttggttccaggcacaacactgtcacctatggaaggtttaagatcacgacccggttccgcacagactctggctgctatgccaccacaggcctgaagatgaagcacctccttaccgggcaagagaggaccgtctggcacctccaatacacagactggcctgaacatggctgtccagaagacctcaagggatttttatcatatcttgaagagatccagtctgttcgacgccatacaaatagcacaagtgatccccaaagccccaaccctccgttgttggtccactgcagtgctggggtaggaaggactggcgtggtgattttgtcggagatcatgatcgcctgcctggaacacaatgaggtgctggacatcccgagagtgctggacatgctgaggcaacagagaatgatgctggtgcagactctctgccagtacacatttgtgtacagagtcctcatccagttcctgaaaagctccaggctcatctaagctcccacaatttcttacggggccagtcatgtgaagcgtttacagcttaaaaaaaaagcgcttgcctaactcatactttcccgttgacacttgatccacgcagcgtggcactgggacgtaagtggcgcagtctgaatggcggcacgctgaaggaaacgtgcgaagcacaggctgaagaggggtttctaacctgggaaaggtgctcaaggaggacttggtttcaagggccttgccctgccccggtctgtccggtttgcagtacttgcacacattttggagattgtattttctagacaattctctattttactgaagctatgctgggcaattctggcaatcattaaagtgcatagatttctatcttaaaaaaaaaaaaa

SEQ ID NO: 322 - DNA, 8091 bp, Homo sapiens
acgcggcgcggaggctggcccgggacgcgcccggagcccagggaaggagggaggaggggagggtcgcggccggccgccatggggccgggggcccgtggccgccgccgccgccgtcgcccgatgtcgccgccaccgccaccgccacccgtgcgggcgctgcccctgctgctgctgctagcggggccgggggctgcagcccccccttgcctggacggaagcccgtgtgcaaatggaggtcgttgcacccagctgccctcccgggaggctgcctgcctgtgcccgcctggctgggtgggtgagcggtgtcagctggaggacccctgtcactcaggcccctgtgctggccgtggtgtctgccagagttcagtggtggctggcaccgcccgattctcatgccggtgcccccgtggcttccgaggccctgactgctccctgccagatccctgcctcagcagcccttgtgcccacggtgcccgctgctcagtggggcccgatggacgcttcctctgctcctgcccacctggctaccagggccgcagctgccgaagcgacgtggatgagtgccgggtgggtgagccctgccgccatggtggcacctgcctcaacacacctggctccttccgctgccagtgtccagctggctacacagggccactatgtgagaaccccgcggtgccctgtgcgccctcaccatgccgtaacgggggcacctgcaggcagagtggcgacctcacttacgactgtgcctgtcttcctgggtttgagggtcagaattgtgaagtgaacgtggacgactgtccaggacaccgatgtctcaatggggggacatgcgtggatggcgtcaacacctataactgccagtgccctcctgagtggacaggccagttctgcacggaggacgtggatgagtgtcagctgcagcccaacgcctgccacaatgggggtacctgcttcaacacgctgggtggccacagctgcgtgtgtgtcaatggctggacaggtgagagctgcagtcagaatatcgatgactgtgccacagccgtgtgcttccatggggccacctgccatgaccgcgtggcttctttctactgtgcctgccccatgggcaagactggcctcctgtgtcacctggatgacgcctgtgtcagcaacccctgccacgaggatgctatctgtgacacaaatccggtgaacggccgggccatttgcacctgtcctcccggcttcacgggtggggcatgtgaccaggatgtggacgagtgctctatcggcgccaacccctgcgagcacttgggcaggtgcgtgaacacgcagggctccttcctgtgccagtgcggtcgtggctacactggacctcgctgtgagaccgatgtcaacgagtgtctgtcggggccctgccgaaaccaggccacgtgcctcgaccgcataggccagttcacctgtatctgtatggcaggcttcacaggaacctattgcgaggtggacattgacgagtgtcagagtagcccctgtgtcaacggtggggtctgcaaggaccgagtcaatggcttcagctgcacctgcccctcgggcttcagcggctccacgtgtcagctggacgtggacgaatgcgccagcacgccctgcaggaatggcgccaaatgcgtggaccagcccgatggctacgagtgccgctgtgccgagggctttgagggcacgctgtgtgatcgcaacgtggacgactgctcccctgacccatgccaccatggtcgctgcgtggatggcatcgccagcttctcatgtgcctgtgctcctggctacacgggcacacgctgcgagagccaggtggacgaatgccgcagccagccctgccgccatggcggcaaatgcctagacctggtggacaagtacctctgccgctgcccttctgggaccacaggtgtgaactgcgaagtgaacattgacgactgtgccagcaacccctgcacctttggagtctgccgtgatggcatcaaccgctacgactgtgtctgccaacctggcttcacagggcccctttgtaacgtggagatcaatgagtgtgcttccagcccatgcggcgagggaggttcctgtgtggatggggaaaatggcttccgctgcctctgcccgcctggctccttgcccccactctgcctccccccgagccatccctgtgcccatgagccctgcagtcacggcatctgctatgatgcacctggcgggttccgctgtgtgtgtgagcctggctggagtggcccccgctgcagccagagcctggcccgagacgcctgtgagtcccagccgtgcagggccggtgggacatgcagcagcgatggaatgggtttccactgcacctgcccgcctggtgtccagggacgtcagtgtgaactcctctccccctgcaccccgaacccctgtgagcatgggggccgctgcgagtctgcccctggccagctgcctgtctgctcctgcccccagggctggcaaggcccacgatgccagcaggatgtggacgagtgtgctggccccgcaccctgtggccctcatggtatctgcaccaacctggcagggagtttcagctgcacctgccatggagggtacactggcccttcctgtgatcaggacatcaatgactgtgaccccaacccatgcctgaacggtggctcgtgccaagacggcgtgggctccttttcctgctcctgcctccctggtttcgccggcccacgatgcgcccgcgatgtggatgagtgcctgagcaacccctgcggcccgggcacctgtaccgaccacgtggcctccttcacctgcacctgcccgccgggctacggaggcttccactgcgaacaggacctgcccgactgcagccccagctcctgcttcaatggcgggacctgtgtggacggcgtgaactcgttcagctgcctgtgccgtcccggctacacaggagcccactgccaacatgaggcagacccctgcctctcgcggccctgcctacacgggggcgtctgcagcgccgcccaccctggcttccgctgcacctgcctcgagagcttcacgggcccgcagtgccagacgctggtggattggtgcagccgccagccttgtcaaaacgggggtcgctgcgtccagactggggcctattgcctttgtccccctggatggagcggacgcctctgtgacatccgaagcttgccctgcagggaggccgcagcccagatcggggtgcggctggagcagctgtgtcaggcgggtgggcagtgtgtggatgaagacagctcccactactgcgtgtgcccagagggccgtactggtagccactgtgagcaggaggtggacccctgcttggcccagccctgccagcatggggggacctgccgtggctatatggggggctacatgtgtgagtgtcttcctggctacaatggtgataactgtgaggacgacgtggacgagtgtgcctcccagccctgccagcacgggggttcatgcattgacctcgtggcccgctatctctgctcctgtcccccaggaacgctgggggtgctctgcgagattaatgaggatgactgcggcccaggcccaccgctggactcagggccccggtgcctacacaatggcacctgcgtggacctggtgggtggtttccgctgcacctgtcccccaggatacactggtttgcgctgcgaggcagacatcaatgagtgtcgctcaggtgcctgccacgcggcacacacccgggactgcctgcaggacccaggcggaggtttccgttgcctttgtcatgctggcttctcaggtcctcgctgtcagactgtcctgtctccctgcgagtcccagccatgccagcatggaggccagtgccgtcctagcccgggtcctgggggtgggctgaccttcacctgtcactgtgcccagccgttctggggtccgcgttgcgagcgggtggcgcgctcctgccgggagctgcagtgcccggtgggcgtcccatgccagcagacgccccgcgggccgcgctgcgcctgccccccagggttgtcgggaccctcctgccgcagcttcccggggtcgccgccgggggccagcaacgccagctgcgcggccgccccctgtctccacgggggctcctgccgccccgcgccgctcgcgcccttcttccgctgcgcttgcgcgcagggctggaccgggccgcgctgcgaggcgcccgccgcggcacccgaggtctcggaggagccgcggtgcccgcgcgccgcctgccaggccaagcgcggggaccagcgctgcgaccgcgagtgcaacagcccaggctgcggctgggacggcggcgactgctcgctgagcgtgggcgacccctggcggcaatgcgaggcgctgcagtgctggcgcctcttcaacaacagccgctgcgaccccgcctgcagctcgcccgcctgcctctacgacaacttcgactgccacgccggtggccgcgagcgcacttgcaacccggtgtacgagaagtactgcgccgaccactttgccgacggccgctgcgaccagggctgcaacacggaggagtgcggctgggatgggctggattgtgccagcgaggtgccggccctgctggcccgcggcgtgctggtgctcacagtgctgctgccgccggaggagctactgcgttccagcgccgactttctgcagcggctcagcgccatcctgcgcacctcgctgcgcttccgcctggacgcgcacggccaggccatggtcttcccttaccaccggcctagtcctggctccgaaccccgggcccgtcgggagctggcccccgaggtgatcggctcggtagtaatgctggagattgacaaccggctctgcctgcagtcgcctgagaatgatcactgcttccccgatgcccagagcgccgctgactacctgggagcgttgtcagcggtggagcgcctggacttcccgtacccactgcgggacgtgcggggggagccgctggagcctccagaacccagcgtcccgctgctgccactgctagtggcgggcgctgtcttgctgctggtcattctcgtcctgggtgtcatggtggcccggcgcaagcgcgagcacagcaccctctggttccctgagggcttctcactgcacaaggacgtggcctctggtcacaagggccggcgggaacccgtgggccaggacgcgctgggcatgaagaacatggccaagggtgagagcctgatgggggaggtggccacagactggatggacacagagtgcccagaggccaagcggctaaaggtagaggagccaggcatgggggctgaggaggctgtggattgccgtcagtggactcaacaccatctggttgctgctgacatccgcgtggcaccagccatggcactgacaccaccacagggcgacgcagatgctgatggcatggatgtcaatgtgcgtggcccagatggcttcaccccgctaatgctggcttccttctgtgggggggctctggagccaatgccaactgaagaggatgaggcagatgacacatcagctagcatcatctccgacctgatctgccagggggctcagcttggggcacggactgaccgtactggcgagactgctttgcacctggctgcccgttatgcccgtgctgatgcagccaagcggctgctggatgctggggcagacaccaatgcccaggaccactcaggccgcactcccctgcacacagctgtcacagccgatgcccagggtgtcttccagattctcatccgaaaccgctctacagacttggatgcccgcatggcagatggctcaacggcactgatcctggcggcccgcctggcagtagagggcatggtggaagagctcatcgccagccatgctgatgtcaatgctgtggatgagcttgggaaatcagccttacactgggctgcggctgtgaacaacgtggaagccactttggccctgctcaaaaatggagccaataaggacatgcaggatagcaaggaggagacccccctattcctggccgcccgcgagggcagctatgaggctgccaagctgctgttggaccactttgccaaccgtgagatcaccgaccacctggacaggctgccgcgggacgtagcccaggagagactgcaccaggacatcgtgcgcttgctggatcaacccagtgggccccgcagcccccccggtccccacggcctggggcctctgctctgtcctccaggggccttcctccctggcctcaaagcggcacagtcggggtccaagaagagcaggaggccccccgggaaggcggggctggggccgcaggggccccgggggcggggcaagaagctgacgctggcctgcccgggccccctggctgacagctcggtcacgctgtcgcccgtggactcgctggactccccgcggcctttcggtgggccccctgcttcccctggtggcttcccccttgaggggccctatgcagctgccactgccactgcagtgtctctggcacagcttggtggcccaggccgggcaggtctagggcgccagccccctggaggatgtgtactcagcctgggcctgctgaaccctgtggctgtgcccctcgattgggcccggctgcccccacctgcccctccaggcccctcgttcctgctgccactggcgccgggaccccagctgctcaacccagggacccccgtctccccgcaggagcggcccccgccttacctggcagtcccaggacatggcgaggagtacccggtggctggggcacacagcagccccccaaaggcccgcttcctgcgggttcccagtgagcacccttacctgaccccatcccccgaatcccctgagcactgggccagcccctcacctccctccctctcagactggtccgaatccacgcctagcccagccactgccactggggccatggccaccaccactggggcactgcctgcccagccacttcccttgtctgttcccagctcccttgctcaggcccagacccagctggggccccagccggaagttacccccaagaggcaagtgttggcctgagacgctcgtcagttcttagatcttgggggcctaaagagacccccgtcctgcctcctttctttctctgtctcttccttccttttagtctttttcatcctcttctctttccaccaaccctcctgcatccttgccttgcagcgtgaccgagataggtcatcagcccagggcttcagtcttcctttatttataatgggtgggggctaccacccaccctctcagtcttgtgaagagtctgggacctccttcttccccacttctctcttccctcattcctttctctctccttctggcctctcatttccttacactctgacatgaatgaattattattatttttctttttctttttttttttacattttgtatagaaacaaattcatttaaacaaacttattattattattttttacaaaatatatatatggagatgctccctccccctgtgaaccccccagtgcccccgtggggctgagtctgtgggcccattcggccaagctggattctgtgtacctagtacacaggcatgactgggatcccgtgtaccgagtacacgacccaggtatgtaccaagtaggcacccttgggcgcacccactggggccaggggtcgggggagtgttgggagcctcctccccaccccacctccctcacttcactgcattccagattggacatgttccatagccttgctggggaagggcccactgccaactccctctgccccagccccacccttggccatctccctttgggaactagggggctgctggtgggaaatgggagccagggcagatgtatgcattcctttatgtccctgtaaatgtgggactacaagaagaggagctgcctgagtggtactttctcttcctggtaatcctctggcccagccttatggcagaatagaggtatttttaggctatttttgtaatatggcttctggtcaaaatccctgtgtagctgaattcccaagccctgcattgtacagccccccactcccctcaccacctaataaaggaatagttaacactcaaaaaaaaaaaaaaaaaaa

SEQ ID NO: 323 - DNA, 5722 bp, Homo sapiens
ggacgcacaggcattccccgcgcccctccagccctcgccgccctcgccaccgctcccggccgccgcgctccggtacacacaggatccctgctgggcaccaacagctccaccatggggctggcctggggactaggcgtcctgttcctgatgcatgtgtgtggcaccaaccgcattccagagtctggcggagacaacagcgtgtttgacatctttgaactcaccggggccgcccgcaaggggtctgggcgccgactggtgaagggccccgacccttccagcccagctttccgcatcgaggatgccaacctgatcccccctgtgcctgatgacaagttccaagacctggtggatgctgtgcgggcagaaaagggtttcctccttctggcatccctgaggcagatgaagaagacccggggcacgctgctggccctggagcggaaagaccactctggccaggtcttcagcgtggtgtccaatggcaaggcgggcaccctggacctcagcctgaccgtccaaggaaagcagcacgtggtgtctgtggaagaagctctcctggcaaccggccagtggaagagcatcaccctgtttgtgcaggaagacagggcccagctgtacatcgactgtgaaaagatggagaatgctgagttggacgtccccatccaaagcgtcttcaccagagacctggccagcatcgccagactccgcatcgcaaaggggggcgtcaatgacaatttccagggggtgctgcagaatgtgaggtttgtctttggaaccacaccagaagacatcctcaggaacaaaggctgctccagctctaccagtgtcctcctcacccttgacaacaacgtggtgaatggttccagccctgccatccgcactaactacattggccacaagacaaaggacttgcaagccatctgcggcatctcctgtgatgagctgtccagcatggtcctggaactcaggggcctgcgcaccattgtgaccacgctgcaggacagcatccgcaaagtgactgaagagaacaaagagttggccaatgagctgaggcggcctcccctatgctatcacaacggagttcagtacagaaataacgaggaatggactgttgatagctgcactgagtgtcactgtcagaactcagttaccatctgcaaaaaggtgtcctgccccatcatgccctgctccaatgccacagttcctgatggagaatgctgtcctcgctgttggcccagcgactctgcggacgatggctggtctccatggtccgagtggacctcctgttctacgagctgtggcaatggaattcagcagcgcggccgctcctgcgatagcctcaacaaccgatgtgagggctcctcggtccagacacggacctgccacattcaggagtgtgacaaaagatttaaacaggatggtggctggagccactggtccccgtggtcatcttgttctgtgacatgtggtgatggtgtgatcacaaggatccggctctgcaactctcccagcccccagatgaatgggaaaccctgtgaaggcgaagcgcgggagaccaaagcctgcaagaaagacgcctgccccatcaatggaggctggggtccttggtcaccatgggacatctgttctgtcacctgtggaggaggggtacagaaacgtagtcgtctctgcaacaaccccgcaccccagtttggaggcaaggactgcgttggtgatgtaacagaaaaccagatctgcaacaagcaggactgtccaattgatggatgcctgtccaatccctgctttgccggcgtgaagtgtactagctaccctgatggcagctggaaatgtggtgcttgtccccctggttacagtggaaatggcatccagtgcacagatgttgatgagtgcaaagaagtgcctgatgcctgcttcaaccacaatggagagcaccggtgtgagaacacggaccccggctacaactgcctgccctgccccccacgcttcaccggctcacagcccttcggccagggtgtcgaacatgccacggccaacaaacaggtgtgcaagccccgtaacccctgcacggatgggacccacgactgcaacaagaacgccaagtgcaactacctgggccactatagcgaccccatgtaccgctgcgagtgcaagcctggctacgctggcaatggcatcatctgcggggaggacacagacctggatggctggcccaatgagaacctggtgtgcgtggccaatgcgacttaccactgcaaaaaggataattgccccaaccttcccaactcagggcaggaagactatgacaaggatggaattggtgatgcctgtgatgatgacgatgacaatgataaaattccagatgacagggacaactgtccattccattacaacccagctcagtatgactatgacagagatgatgtgggagaccgctgtgacaactgtccctacaaccacaacccagatcaggcagacacagacaacaatggggaaggagacgcctgtgctgcagacattgatggagacggtatcctcaatgaacgggacaactgccagtacgtctacaatgtggaccagagagacactgatatggatggggttggagatcagtgtgacaattgccccttggaacacaatccggatcagctggactctgactcagaccgcattggagatacctgtgacaacaatcaggatattgatgaagatggccaccagaacaatctggacaactgtccctatgtgcccaatgccaaccaggctgaccatgacaaagatggcaagggagatgcctgtgaccacgatgatgacaacgatggcattcctgatgacaaggacaactgcagactcgtgcccaatcccgaccagaaggactctgacggcgatggtcgaggtgatgcctgcaaagatgattttgaccatgacagtgtgccagacatcgatgacatctgtcctgagaatgttgacatcagtgagaccgatttccgccgattccagatgattcctctggaccccaaagggacatcccaaaatgaccctaactgggttgtacgccatcagggtaaagaactcgtccagactgtcaactgtgatcctggactcgctgtaggttatgatgagtttaatgctgtggacttcagtggcaccttcttcatcaacaccgaaagggacgatgactatgctggatttgtctttggctaccagtccagcagccgcttttatgttgtgatgtggaagcaagtcacccagtcctactgggacaccaaccccacgagggctcagggatactcgggcctttctgtgaaagttgtaaactccaccacagggcctggcgagcacctgcggaacgccctgtggcacacaggaaacacccctggccaggtgcgcaccctgtggcatgaccctcgtcacataggctggaaagatttcaccgcctacagatggcgtctcagccacaggccaaagacgggtttcattagagtggtgatgtatgaagggaagaaaatcatggctgactcaggacccatctatgataaaacctatgctggtggtagactagggttgtttgtcttctctcaagaaatggtgttcttctctgacctgaaatacgaatgtagagatccctaatcatcaaattgttgattgaaagactgatcataaaccaatgctggtattgcaccttctggaactatgggcttgagaaaacccccaggatcacttctccttggcttccttcttttctgtgcttgcatcagtgtggactcctagaacgtgcgacctgcctcaagaaaatgcagttttcaaaaacagactcatcagcattcagcctccaatgaataagacatcttccaagcatataaacaattgctttggtttccttttgaaaaagcatctacttgcttcagttgggaaggtgcccattccactctgcctttgtcacagagcagggtgctattgtgaggccatctctgagcagtggactcaaaagcattttcaggcatgtcagagaagggaggactcactagaattagcaaacaaaaccaccctgacatcctccttcaggaacacggggagcagaggccaaagcactaaggggagggcgcatacccgagacgattgtatgaagaaaatatggaggaactgttacatgttcggtactaagtcattttcaggggattgaaagactattgctggatttcatgatgctgactggcgttagctgattaacccatgtaaataggcacttaaatagaagcaggaaagggagacaaagactggcttctggacttcctccctgatccccacccttactcatcaccttgcagtggccagaattagggaatcagaatcaaaccagtgtaaggcagtgctggctgccattgcctggtcacattgaaattggtggcttcattctagatgtagcttgtgcagatgtagcaggaaaataggaaaacctaccatctcagtgagcaccagctgcctcccaaaggaggggcagccgtgcttatatttttatggttacaatggcacaaaattattatcaacctaactaaaacattccttttctcttttttccgtaattactaggtagttttctaattctctcttttggaagtatgatttttttaaagtctttacgatgtaaaatatttattttttacttattctggaagatctggctgaaggattattcatggaacaggaagaagcgtaaagactatccatgtcatctttgttgagagtcttcgtgactgtaagattgtaaatacagattatttattaactctgttctgcctggaaatttaggcttcatacggaaagtgtttgagagcaagtagttgacatttatcagcaaatctcttgcaagaacagcacaaggaaaatcagtctaataagctgctctgccccttgtgctcagagtggatgttatgggattccttttttctctgttttatcttttcaagtggaattagttggttatccatttgcaaatgttttaaattgcaaagaaagccatgaggtcttcaatactgttttaccccatcccttgtgcatatttccagggagaaggaaagcatatacacttttttctttcatttttccaaaagagaaaaaaatgacaaaaggtgaaacttacatacaaatattacctcatttgttgtgtgactgagtaaagaatttttggatcaagcggaaagagtttaagtgtctaacaaacttaaagctactgtagtacctaaaaagtcagtgttgtacatagcataaaaactctgcagagaagtattcccaataaggaaatagcattgaaatgttaaatacaatttctgaaagttatgttttttttctatcatctggtataccattgctttatttttataaattattttctcattgccattggaatagaatattcagattgtgtagatatgctatttaaataatttatcaggaaatactgcctgtagagttagtatttctatttttatataatgtttgcacactgaattgaagaattgttggttttttcttttttttgttttttttttttttttttttttttttgcttttgacctcccatttttactatttgccaatacctttttctaggaatgtgcttttttttgtacacatttttatccattttacattctaaagcagtgtaagttgtatattactgtttcttatgtacaaggaacaacaataaatcatatggaaatttatattt

SEQ ID NO: 324 - DNA, 6147 bp, Homo sapiens
gcgggcgccggcaatcgagtggcttcctggccatggagaggagatctggacccgaggacgccagggactcctctccgtctccctggaccgctgtgtaggcacctgagttaacggacgctaagcggggtaggggaagtaacagtgtatcatgtatgccactgattccaggggacactcccctgctttcctccaacctcagaatggaaatagtcgtcacccatctggctatgttccagggaaggttgtcccattgcgtccccctcctcctccaaagagtcaagcttcagccaaatttacctccatcagacgagaagaccgggcaaccttcgcattctcacctgaagaacagcaagcccagagagaaagtcaaaagcaaaagagacacaaaaatactttcatttgttttgctattactagtttctcattttttattgcacttgcaatcattttaggaatatcctcaaaatatgctccagatgaaaattgcccagatcaaaatcctcgtctcaggaattgggatccaggacaagattctgcaaagcaagttgttatcaaggagggagatatgctccgtctgacctcagacgccaccgtgcattctatagtcattcaggatggaggactgcttgtatttggggacaataaagatggatccagaaatattactttgaggactcattacatcctgatccaggatggtggggcgcttcatattggagcagaaaaatgccgctataaatccaaagcgacaattaccttgtatggcaagtcagatgaaggtgaaagtatgccaacatttggcaaaaagtttattggtgtggaagctggcgggacactggagttacatggggcacggaaggcatcgtggacgttgttggcaaggaccctgaattcctcaggcttgccctttgggtcctatacctttgaaaaggacttttcccggggcctcaatgtgagggtcattgaccaagacacggccaaaattttggaaagtgagagatttgatacccatgaataccgcaatgagagcaggcggcttcaggagtttctgagattccaggatccaggtcggattgttgccatagctgtcggggattcagccgctaaaagtctcttacaaggaaccatccagatgatccaggaacggttgggaagtgaactgatccaaggactgggctacaggcaagcttgggctttagttggtgtcattgatggtggaagcacttcttgcaatgaatccgtgagaaactatgaaaatcatagcagtggcgggaaggctcttgcccaaagagaattttatactgtggatggccagaagttctctgtgacagcttatagtgaatggattgaaggcgtttctctttcaggattccgggtagaggttgtagatggagtgaagctaaatttgctagatgatgttagtagttggaaacctggagaccagattgtggtcgcaagcacagactattccatgtaccaagcagaggagttcactcttcttccctgttctgaatgcagccattttcaggtcaaagtcaaagaaacccctcagttcctgcacatgggtgagatcatagacggtgtagacatgagagctgaggttggaattcttacccggaatattgtgatccaaggagaagtggaggactcatgctacgcagaaaatcagtgccaattttttgattatgatacctttgggggacacattatgataatgaaaaattttacttcagtccatctttcttatgtggaattgaaacacatgggtcagcagcagatggggcgataccctgttcattttcacctgtgtggtgacgtggattataaaggaggatacagacatgcaacatttgtggacggcctgtctattcatcacagcttctcaaggtgcatcactgtgcatgggacaaatggcttgctaataaaagacaccattgggtttgacacactaggtcattgtttctttttggaagatggtattgaacagaggaatactttgttccacaatctgggactcctcaccaagccgggtactctcctgcccaccgataggaacaactccatgtgtaccaccatgcgagataaagtgtttggaaattacattcctgtgcctgctactgactgtatggctgtttcaactttctggattgctcatcccaacaataatctgattaataatgcagctgcaggctcacaggatgctggaatatggtatttattccacaaggaaccaactggggaatccagtggattgcagctcttggcaaaaccagaactcactccattgggtatattttataacaacagggtccattcaaattttaaggctggcttatttattgacaaaggtgtcaaaacaaccaactctagtgctgctgacccaagggaatacctctgtttggacaatagtgcaagatttcgacctcatcaggatgcaaaccccgaaaaaccacgtgttgctgctctaattgacaggctcattgcttttaaaaataatgataatggagcttgggtcagaggaggagatattatcgttcaaaattcagcatttgcagataatggaataggactgacctttgccagtgatggaagcttcccaagtgatgaaggttccagccaagaggtatctgaatctctctttgttggggagagcaggaattacggctttcagggtggtcagaacaagtatgtaggcactggaggaatagaccagaagcctcgaacattacccaggaacaggacgttcccaattagaggctttcagatttatgatgggcccattcatctcacaaggagcactttcaaaaaatatgtgccaactccagataggtacagcagtgcaattggcttcctcatgaagaattcctggcagataacccccaggaataatatctccctcgtgaagtttggtccacatgtctctctgaatgtcttttttggaaagcctggtccctggtttgaagattgtgagatggatggtgataagaactccatattccatgacattgatggctctgtgacaggatacaaggatgcttatgtgggaagaatggacaactacctgatccgccatccaagctgtgtaaatgtgtctaagtggaatgcagtgatctgcagtgggacctatgcacaggtctatgtacagacatggagcactcagaatctttctatgaccattacacgagatgagtatccgtccaaccctatggtgctccgaggtattaatcagaaggctgcctttccacagtaccagcctgtcgtcatgctggagaagggttataccatccactggaatgggccggcaccacggactacatttctatacctcgtcaacttcaacaagaatgactggattcgagttggcctttgctatccatcaaacacaagttttcaagttacctttggctatttgcagcggcagaatggctcattatccaaaatcgaagaatatgagcctgtgcattcactggaagaactgcaaagaaagcaatccgagaggaaattctattttgactccagcacggggttactgtttttgtatctcaaagccaaaagccacaggcatggccacagttactgttcatctcagggatgtgaaagagtcaagatccaagcagccacagactcaaaggacatcagtaactgcatggccaaagcatacccacagtactacagaaagccgtcagtggtcaagcggatgccggccatgctcactggactctgtcaaggctgtggcactcggcaggtggtgtttactagtgatcctcataaaagttacctccctgtgcaattccagtcacctgataaagcagaaacccagcgtggagacccgtctgttatttctgtcaatggcactgactttaccttccgaagtgcaggcgtcctcctccttgttgtggatccgtgcagcgttccattccgcttgacggaaaaaacggtttttcctcttgctgatgtcagtcgcattgaagagtatttaaaaacaggcatccctccaaggtccattgttctgttgagcacaagaggagaaataaagcagttaaacatttcacacttactagtacctctgggattagccaaaccagctcatctttatgacaaagggagtaccatatttttgggattcagtggaaactttaaaccatcatggactaagctatttaccagtcctgctggacagggccttggggtgcttgaacaattcatacctttgcagctggacgaatatggttgtcccagagccaccactgtccgcagaagagacctggaactgctaaagcaagcttcaaaagcacattagagactaactgtaacttaagtgctgggggaaaaaaaatgtgaactaacttatttaatttatggcattttaaaatgacactgttaacccaacggaaccattttccagtttgatacagaatggggagaaaagaaagcgtttgaaattattgcttggataccagcttcatgcaccttctagttgtacaaaatgttaaagacgttgtttgtatttgtaaggctggtgtattcagagagcagatctcttattcctcactttccacccccgtattttgtaatgaccatgagcaatgtttttactttttgtataatggggtggggtggagtgggggcttctgagagtcagcctgaggtctttagaggaccagctattgtagcaccttggatacttgaagtttaatgctcagttgggtcgggtggcagttgacttggtggctggcatgttcagcagtgcctggggccctgtttctgggcagcctttgaggattttctatgatattgaatgacagttttaagtggcaactcaggcccagctcatgcccttttttgcctggacatgtgctatttttattcacttatatatcaattacttgtaagggttaaactttcaaacaggaagtatattgggacaaaagggctcttggggattagatatccctttaatctgtgaccatggggcaaaaaattttcctgcagcaaaagtctgaggctgttgggaccatttttgcagctttaatccttagcctcttttgactgtatatttgtgtttaaaatgcagagctcaactgaatatttccttttttgttttgttttgttttgttttaagaagtaggttgttttcctgaaccgtaaacttgtatcattttaacttgcacaaaggaagtctgttcttggtattgctcttgcacttgggttttttgttattgttttgtgtggattttttaaagcttttctgttcaccctcctgccaggaaaatcccagaaagcttaatgataccccaaaatgattacacccagggaggaaaaaaaggagcgctttctagggtcagaatcgtggagagaatactcagaacatgaacctctttaaagccttgcaggaatgagtcactcttacttaatgaaatgttaaagccaattaaaaagcatgctgtgatgcccagcttccctttccacagggtgcatgcgtctcctgctggtgaatcacatgcggcaagaggcaactggctccacagcctgggatgctgccgtaccaagaggaaagaagcagcaaaatgcctttacgttgttctaaacccccgacgcataaagtgtagaggagggatggccaagggtgggtggtagaaagtgtgttcaggctgacactggcaatgagtacagataatttcactttcctcttccaggggcaaaggctgatggcctctacctttgtatccaggagaaactgcagagcagccctgtgactttacaaaatatgctacctcaaagtgctaccgataaacctttctaattgtaagtgcccttactaagggcacatgtcttaatcaaagttagttttttgttttctggtttgttttttttttttttgtatattgatgaatgagatcttacctattaaatatattattggaaaaaaaaaaaaaaaaaaaattaaagtttgagtgtgtgtgtgtgtgtgtgtgtgtgtgtgtgtgtgtgtgttttatgacttaaatatctttacgtgtgttttttagagcttggttctttaaagatttggagaagatatgtaaattaccaaggcacttggtttttctgttttatatactaataatcagggcctaagttaaataaaaatatgtgtgcatgtatttt

SEQ ID NO: 325 - DNA, 5062 bp, Homo sapiens
cactaacgctcttcctagtccccgggccaactcggacagtttgctcatttattgcaacggtcaaggctggcttgtgccagaacggcgcgcgcgcgacgcacgcacacacacggggggaaacttttttaaaaatgaaaggctagaagagctcagcggcggcgcgggccgtgcgcgagggctccggagctgactcgccgaggcaggaaatccctccggtcgcgacgcccggccccgctcggcgcccgcgtgggatggtgcagcgctcgccgccgggcccgagagctgctgcactgaaggccggcgacgatggcagcgcgcccgctgcccgtgtcccccgcccgcgccctcctgctcgccctggccggtgctctgctcgcgccctgcgaggcccgaggggtgagcttatggaaccaaggaagagctgatgaagttgtcagtgcctctgttcggagtggggacctctggatcccagtgaagagcttcgactccaagaatcatccagaagtgctgaatattcgactacaacgggaaagcaaagaactgatcataaatctggaaagaaatgaaggtctcattgccagcagtttcacggaaacccactatctgcaagacggtactgatgtctccctcgctcgaaattacacggtaattctgggtcactgttactaccatggacatgtacggggatattctgattcagcagtcagtctcagcacgtgttctggtctcaggggacttattgtgtttgaaaatgaaagctatgtcttagaaccaatgaaaagtgcaaccaacagatacaaactcttcccagcgaagaagctgaaaagcgtccggggatcatgtggatcacatcacaacacaccaaacctcgctgcaaagaatgtgtttccaccaccctctcagacatgggcaagaaggcataaaagagagaccctcaaggcaactaagtatgtggagctggtgatcgtggcagacaaccgagagtttcagaggcaaggaaaagatctggaaaaagttaagcagcgattaatagagattgctaatcacgttgacaagttttacagaccactgaacattcggatcgtgttggtaggcgtggaagtgtggaatgacatggacaaatgctctgtaagtcaggacccattcaccagcctccatgaatttctggactggaggaagatgaagcttctacctcgcaaatcccatgacaatgcgcagcttgtcagtggggtttatttccaagggaccaccatcggcatggccccaatcatgagcatgtgcacggcagaccagtctgggggaattgtcatggaccattcagacaatccccttggtgcagccgtgaccctggcacatgagctgggccacaatttcgggatgaatcatgacacactggacaggggctgtagctgtcaaatggcggttgagaaaggaggctgcatcatgaacgcttccaccgggtacccatttcccatggtgttcagcagttgcagcaggaaggacttggagaccagcctggagaaaggaatgggggtgtgcctgtttaacctgccggaagtcagggagtctttcgggggccagaagtgtgggaacagatttgtggaagaaggagaggagtgtgactgtggggagccagaggaatgtatgaatcgctgctgcaatgccaccacctgtaccctgaagccggacgctgtgtgcgcacatgggctgtgctgtgaagactgccagctgaagcctgcaggaacagcgtgcagggactccagcaactcctgtgacctcccagagttctgcacaggggccagccctcactgcccagccaacgtgtacctgcacgatgggcactcatgtcaggatgtggacggctactgctacaatggcatctgccagactcacgagcagcagtgtgtcacactctggggaccaggtgctaaacctgcccctgggatctgctttgagagagtcaattctgcaggtgatccttatggcaactgtggcaaagtctcgaagagttcctttgccaaatgcgagatgagagatgctaaatgtggaaaaatccagtgtcaaggaggtgccagccggccagtcattggtaccaatgccgtttccatagaaacaaacatccccctgcagcaaggaggccggattctgtgccgggggacccacgtgtacttgggcgatgacatgccggacccagggcttgtgcttgcaggcacaaagtgtgcagatggaaaaatctgcctgaatcgtcaatgtcaaaatattagtgtctttggggttcacgagtgtgcaatgcagtgccacggcagaggggtgtgcaacaacaggaagaactgccactgcgaggcccactgggcacctcccttctgtgacaagtttggctttggaggaagcacagacagcggccccatccggcaagcagataaccaaggtttaaccataggaattctggtgaccatcctgtgtcttcttgctgccggatttgtggtttatctcaaaaggaagaccttgatacgactgctgtttacaaataagaagaccaccattgaaaaactaaggtgtgtgcgcccttcccggccaccccgtggcttccaaccctgtcaggctcacctcggccaccttggaaaaggcctgatgaggaagccgccagattcctacccaccgaaggacaatcccaggagattgctgcagtgtcagaatgttgacatcagcagacccctcaacggcctgaatgtccctcagccccagtcaactcagcgagtgcttcctcccctccaccgggccccacgtgcacctagcgtccctgccagacccctgccagccaagcctgcacttaggcaggcccaggggacctgtaagccaaacccccctcagaagcctctgcctgcagatcctctggccagaacaactcggctcactcatgccttggccaggaccccaggacaatgggagactgggctccgcctggcacccctcagacctgctccacaatatccacaccaagtgcccagatccacccacaccgcctatattaagtgagaagccgacaccttttttcaacagtgaagacagaagtttgcactatctttcagctccagttggagttttttgtaccaacttttaggattttttttaatgtttaaaacatcattactataagaactttgagctactgccgtcagtgctgtgctgtgctatggtgctctgtctacttgcacaggtacttgtaaattattaatttatgcagaatgttgattacagtgcagtgcgctgtagtaggcatttttaccatcactgagttttccatggcaggaaggcttgttgtgcttttagtattttagtgaacttgaaatatcctgcttgatgggattctggacaggatgtgtttgctttctgatcaaggccttattggaaagcagtcccccaactacccccagctgtgcttatggtaccagatgcagctcaagagatcccaagtagaatctcagttgattttctggattccccatctcaggccagagccaaggggcttcaggtccaggctgtgtttggctttcagggaggccctgtgccccttgacaactggcaggcaggctcccagggacacctgggagaaatctggcttctggccaggaagctttggtgagaacctgggttgcagacaggaatcttaaggtgtagccacaccaggatagagactggaacactagacaagccagaacttgaccctgagctgaccagccgtgagcatgtttggaaggggtctgtagtgtcactcaaggcggtgcttgatagaaatgccaagcacttctttttctcgctgtcctttctagagcactgccaccagtaggttatttagcttgggaaaggtggtgtttctgtaagaaacctactgcccaggcactgcaaaccgccacctccctatactgcttggagctgagcaaatcaccacaaactgtaatacaatgatcctgtattcagacagatgaggactttccatgggaccacaactattttcagatgtgaaccattaaccagatctagtcaatcaagtctgtttactgcaaggttcaacttattaacaattaggcagactctttatgcttgcaaaaactacaaccaatggaatgtgatgttcatgggtatagttcatgtctgctatcattattcgtagatattggacaaagaaccttctctatggggcatcctctttttccaacttggctgcaggaatctttaaaagatgcttttaacagagtctgaacctatttcttaaacacttgcaacctacctgttgagcatcacagaatgtgataaggaaatcaacttgcttatcaacttcctaaatattatgagatgtggcttgggcagcatccccttgaactcttcactcttcaaatgcctgactagggagccatgtttcacaaggtctttaaagtgactaatggcatgagaaatacaaaaatactcagataaggtaaaatgccatgatgcctctgtcttctggactggttttcacattagaagacaattgacaacagttacataattcactctgagtgttttatgagaaagccttcttttggggtcaacagttttcctatgctttgaaacagaaaaatatgtaccaagaatcttggtttgccttccagaaaacaaaactgcatttcactttcccggtgttccccactgtatctaggcaacatagtattcatgactatggataaactaaacacgtgacacaaacacacacaaaagggaacccagctctaatacattccaactcgtatagcatgcatctgtttattctatagttattaagttctttaaaatgtaaagccatgctggaaaataatactgctgagatacatacagaattactgtaactgattacacttggtaattgtactaaagccaaacatatatatactattaaaaaggtttacagaattttatggtgcattacgtgggcattgtctttttagatgcccaaatccttagatctggcatgttagcccttcctccaattataagaggatatgaaccaaaaaaaaaaaaaaaaaaa

SEQ ID NO: 326 - DNA, 1015 bp, Homo sapiens
ctggacgaggcgcgggtcaaaatcggcagaggctcaaccatttatcacccatcaactatttccatcctgtacattttccacccatttacccatctactaattcactcatccatccacctacctatccatttatcatccatctacccactcacccatccatccatccttccaaccatttatccacccatccaaccatttccatctgttcatttccatccatctacccatctacccattcactcatccgtccacctatccatttatcacccatctacccatccatccacccactcatccatccattcatccatacacccacccacccgtccatccacctacctattcatttatcacccatccatccacacacgggtctgtgcagattcattaatatccacccatgcatccatatttatctattttctatccatcagccatccattcattcatatccatccatccatctatccatccagatgtttattgagcacctgtgttctgggtcctatttgggagccttgttaaccaccaagaccttcctaagccatattgtggtatacagacagatacaaaaaaaaaggctctctccctgtctgatctcatgcagcctgccttggagacaagactctcccagtgctgtgtgcttggagagaggaaagcacacagcctggagtcagagacctgggtttcaattcctgtctccacctcttattagctagctatggactcctctctgagcctcgattacctcatctgtgaaatggggtactggtgtgagcagcgttccctggggggatgtgatgcagccactggggcctcatgcactcaagatctctttattagaaacacttatgaaccctagtacatgccagcacgtatgagcgccgggatctttatacaaagggacgaggctctgcctggaagtacattgccagtagtagcaaaaaaaaaaaacaaaaaaaaaaaacccgtttgtgggggaagaaagggtttcgccttaagggacggcaggata

SEQ ID NO: 327 - DNA, 6496 bp, Homo sapiens
cgcactctccgtccccgcggctggcgcaggacctcactcgagcggagcgcccacggggagcgggtcgcggggcggcggcggcgaggaggaggcgagaaggagttggaggaggaggaggaggaggcgagggcgagcgagcccagcggggtcccggccgccccgcgggccaaagtcgagccctcccgcccgtgggcgagcgcgccagccgccccttccagaacagccgccgccacaaagaagaacggggggtgccgaggtccccatgacctcctaaagtggtgcggtccctgctgagtgcgctgcccgggccgtgacccgcgcccctgtgcgtccccgcgcgcctccgagcgcccctgtgcgccccggcccgcgccccgccggcatggacgtccatacccgctggaaagcgcgcagcgcgctccgcccgggcgccccgctgctgcccccgctgctgctgctgctgctgtgggcgccgcctccgagccgcgcagctcagccagcagatctcctgaaggttctagattttcacaacttgcctgatggaataacaaagacaacaggcttttgcgccacgcggcgatcttccaaaggcccggatgtcgcttacagagtcaccaaagacgcgcagctcagcgcacccaccaagcagctgtaccctgcgtctgcatttcccgaggacttctccatcctaacaactgtgaaagccaagaaaggcagccaggccttcctggtctccatctacaacgagcagggtatccagcagattgggctggagctgggccgctctcccgtcttcctctacgaggaccacacggggaagcctggcccggaagactaccccctcttccggggcatcaacctgtcagatggcaagtggcacagaattgctctcagcgtccacaagaaaaatgtcaccttgatcctcgactgtaaaaagaagaccaccaaattcctcgaccgcagcgaccaccccatgatcgacatcaatggcatcatcgtgtttggcacccggatcctggatgaggaggtgtttgagggtgacatccagcagctgctctttgtctcggaccaccgggcagcttatgattactgtgagcactacagccctgactgtgacaccgcagtacctgacaccccacagtcgcaggaccccaatccagatgaatattacacggaaggagacggcgagggtgagacctattactacgaatacccctactacgaagaccccgaagacctagggaaggagcccacccccagcaagaagcccgtggaagctgccaaagaaaccacagaggtccccgaggagctgaccccgacccccacggaagctgctcccatgcctgaaaccagtgaaggggctgggaaggaagaggacgtcggcatcggggactatgactacgtgcccagtgaggactactacacgccctcaccgtatgatgacctcacctatggcgagggggaggagaaccctgaccagcccacagacccaggcgctggggccgaaattcccaccagcaccgccgacacctccaactcctccaatccagctccgcctccaggggaaggtgcggatgacttggagggggagttcactgaggaaacgatccggaaccttgacgagaactactacgacccctactacgaccccaccagctccccgtcggagatcgggccgggaatgccggcgaaccaggataccatctatgaagggattggaggacctcggggcgagaaaggccaaaagggagaaccagcgattatcgagccgggcatgctcatcgagggcccgcctggcccagaaggccccgcgggtcttcccggacctccaggaaccatgggtcccactggccaagtcggggaccctggagaaaggggcccccctggacgcccaggccttcctggggccgatggcctgcccggtcctccaggaaccatgctcatgctgcccttccggtttggaggtggcggcgatgcgggctccaaaggccccatggtctcagcccaggagtcccaggcgcaagccattctccagcaggccaggttggcactgaggggaccagctggcccgatgggtctcacagggagacctggccctgtgggtccccctgggagcggaggtttgaagggcgagccgggagacgtggggcctcagggtcctcgaggtgtgcaaggcccgcctggtccggccgggaagcccggaagacggggtcgggctgggagtgatggagccagaggaatgcctggacaaactggccccaagggtgaccggggtttcgacggcctggctgggttgccaggcgagaagggccacaggggtgaccctggtccttccggcccaccaggacctccgggagacgatggagaaaggggtgacgacggagaagttgggcccagggggctgcctggggagcccgggccacgtggtctgcttgggccgaaagggcccccaggtcctcccggacctcccggtgtcacgggtatggacggccagccggggccaaaaggaaatgtgggtccccagggagagcctggccccccaggacagcagggtaatccaggcgcccagggtcttccaggcccccagggtgcaattggtcctccaggagaaaagggtcccttggggaaaccaggccttccaggaatgcccggtgctgacggacccccgggacaccctggcaaagaaggccctccaggagagaaaggaggtcagggtccacctggcccccagggtccgattggctacccaggtcctcgaggagtcaagggggccgatggcatccgtggtctgaagggcacaaagggcgagaagggtgaagacggctttcctgggtttaaaggagacatgggcatcaagggtgatcggggggagatcggcccacccggtcccaggggagaagatggccctgaaggcccaaagggtcgcggaggtcccaatggtgaccccggtcctctgggaccccctggggagaagggaaaactcggagtcccagggttaccagggtatccaggaagacaaggaccaaagggctctattggattccctggatttcctggcgccaatggagagaagggcggcagggggacccctggaaagccaggaccgcgggggcagcgaggcccaacgggtccgaggggtgaaagaggcccccggggcatcactgggaagcctggccccaagggcaactccggaggtgacggcccagctggccctcctggtgaacggggacccaatggaccccaaggacccacaggatttcctggaccaaagggcccccctggccctccaggcaaggatggactcccaggacaccctggacagagaggcgagactggtttccaaggcaagaccggccctccaggcccccccggcgtggtcggccctcagggtcccacgggagaaacgggcccaatgggtgagcgtggccaccctgggccccctggaccccccggtgaacaggggcttccgggccttgctggaaaagaagggacgaagggtgacccaggccctgcaggcctccctgggaaagatggccctccaggattacgtggtttccctggggaccgagggcttcctggtccagtgggagctcttggactgaaaggcaatgaagggccccctggcccaccaggccctgcgggatctccaggggagagaggtccagctggagccgctgggcccatcggaattccagggagacctgggccccagggacccccagggccggcaggagagaaaggggctcctggcgagaaaggcccacaaggcccagctggccgagacggtctccaggggcctgtggggctcccgggtccagctggccctgtgggtccccctggagaagacggagataagggagagatcggggagccggggcagaaaggaagcaagggggacaaaggagaacagggtcctcctgggcctacaggtcctcaaggccccatcggacagccaggcccctctggagctgacggcgagccggggcctcggggccagcagggccttttcgggcagaaaggtgatgaaggtcccagaggctttcctggaccccctgggccagtggggctgcagggtttgccaggacctccaggcgagaagggtgagacaggagacgtgggccagatgggccccccgggtccccctggcccccgaggaccctccggagctccaggtgctgatggcccacaaggtcccccaggtggaataggaaaccctggtgcagtgggagagaagggcgagcctggcgaagcaggtgagcctggcccttccgggagaagcggccccccgggacccaaaggagaaaggggagagaagggcgagtcaggcccttcaggtgctgccggaccccctggacccaaaggccctcccggagatgatggtcccaaaggcagccctggcccagtgggttttcctggagatcctggcccccccggagagcctggccccgcgggtcaagatggtccccctggtgacaaaggagatgatggtgaacccgggcagacgggatcccccggccctactggtgaaccaggtccatcggggcctccaggaaaaaggggtcccccaggccccgcaggccccgaaggcagacagggagagaaaggggccaagggagaagccggcttggaaggccctcctgggaagactggccccatcggcccccagggggcccctgggaagcccggaccggatggccttcgagggatccctggccctgtgggagaacaaggtctcccaggatccccaggcccggacggtccccccggccccatgggtcccccaggacttcccggcctcaaaggagattctggtcccaaaggtgaaaagggtcatccaggcctgatcgggctcatcggtcctccgggtgaacagggtgagaagggcgaccgtggtctccctggcccccagggctcctccggtcctaagggagaacagggtatcactggtccttctggcccgattgggcctcctgggccccctggcctgccgggtccgcctggtccaaaaggtgctaagggctcctcgggtccaactggcccgaagggtgaggcaggccacccaggacccccaggccccccgggccccccgggagaggtcatccagcccctgccaatccaggcatccaggacgcggcggaacatcgacgccagccagctgctggacgacgggaatggcgagaactacgtggactacgcggacggcatggaagagatcttcggctctctcaactctctgaagctggagattgagcagatgaaacggcccctgggcacgcagcagaaccccgcccgcacctgcaaggacctgcagctctgccaccccgacttcccagatggtgaatactgggtcgatcctaaccaaggatgctccagggattccttcaaggtttactgcaacttcacagccggggggtcgacatgcgtcttccctgacaagaagtccgaaggggccagaatcacttcttggcccaaagaaaacccgggctcctggttcagtgaattcaagcgtgggaaactgctctcctatgtggacgccgagggcaaccctgtgggtgtggtacagatgaccttcctgcggctgctgagcgcctctgcccaccagaacgtcacctaccactgctaccagtcagtggcctggcaggacgcagccacgggcagctacgacaaggccctccgcttcctgggctccaacgacgaggagatgtcctatgacaacaacccctacatccgcgccctggtggacggctgtgctaccaagaaaggctaccagaagacggttctggagatcgacacccccaaagtggagcaggtgcccatcgtggacatcatgttcaatgacttcggtgaagcgtcacagaaatttggatttgaagtggggccggcttgcttcatgggctaggagccgccgagcccgggctcccgagccgaattcagcaacctcgtacctcagcatgccattgcttcgtgagtgtcccgtgcacgtcctgatcctggacagtgaaggcttctccctcccctcccacctgacttcatctacgcctcggcaccacggggtgtgggaccccagcccggagagaacagagggaaggagccgcgcccccacctggagctgaatcacatgacctagctgcaccccagcgcctgggcccgccccacgctctgtccacacccatgcgccccgggagcggggccatgcctccagccccccagctcgcccgacccatcctgttcgtgaataggtctcaggggttgggggagggactgccagatttggacactatatttttttctaaattcaacttgaagatgtgtatttcccctgaccttcaaaaaatgttccaaggtaagcctcgtaaaggtcatcccaccatcaccaaagcctccgtttttaacaacctccaacacgatccatttagaggccaaatgtcattctgcaggtgccttcccgatggattaaaggtgcttatgtttttgtgagttttaagtaaatatttgt

SEQ ID NO: 328 - DNA, 3320 bp, Homo sapiens
  misc_feature (1335)..(1335): N may be C, G, T or A
gaagtttccttgatttccagtggctgctgttgtctgagtggggttggagcaaaactgaggtagtcctaacatttctgggactgaatccaggcaagagaaagaagaaaaagaagaagaaaaagaggaggaaaaagtggattacacaatgacatggagaatgggaccccgtttcactatgctgttggccatgtggctagtgtgtggatcagaaccccacccccatgccactattagaggcagccacggaggacggaaagtgcctttggtttctccggacagcagtaggccagctcggtttctgaggcacactgggaggtctcgcggaattgagagatccactctggaggaaccaaaccttcagcctctccagagaaggaggagtgtgcccgtgttgagactagctcgcccaacagagccgccagcccgctcggacatcaatggggccgccgtgagacctgagcaaagaccagcagccaggggctctccgcgtgagatgatcagagatgaggggtcctcagctcggtcaagaatgttgcgtttcccttcggggtccagctctcccaacatccttgccagctttgcagggaagaacagagtatgggtcatctcagcccctcatgcctcggaaggctactaccgcctcatgatgagcctgctgaaggacgatgtgtactgtgagctggcggagaggcacatccaacagattgtgctcttccaccaggcaggtgaggaaggaggcaaggtgagaaggatcaccagcgagggccagatcctggagcagcccctggaccctagcctcatccctaagctgatgagcttcctgaagctggagaagggcaagtttggcatggtgctgctgaagaagacgctgcaggtggaggagcgctatccatatcccgttaggctggaagccatgtacgaggtcatcgaccaaggccccatccgtaggatcgagaagatcaggcagaagggctttgtccagaaatgtaaggcctctggtgtagagggccaggtggtggcggaggggaatgacggtggagggggagcaggaaggccaagcctgggcagcgagaagaagaaagaggacccaaggagagcacaagtcccaccaaccagagagagtcgggtgaaggtcctgagaaaactggccgccactgcaccagctttgccccaacctccctcaacccccagagccaccacccttcctcctgccccagccacaacagtgactcggtccacgtcccgggcggtaacagttgctgcaagacctatgaccaccactgcctttcccaccacgcagaggccctggaccccctcaccctcccacaggccccntacaaccactgaggtgatcactgccaggagaccctcagtttcagagaatctttaccctccatcccggaaggatcagcacagggagaggccacagacaaccaggaggcccagcaaggccaccagcttggagagcttcacaaatgcccctcccaccaccatctcagaacccagcacaagggctgctggcccaggccgtttccgggacaaccgcatggacaggcgggaacatggccaccgagacccaaatgtggtgccaggtcctcccaagccagcaaaggagaaacctcccaaaaagaaggcccaggacaaaattcttagtaatgagtatgaggagaagtatgacctcagccggcctactgcctctcagctggaggacgagctgcaggtggggaatgttccccttaaaaaagcaaaggagtctaaaaagcatgaaaagcttgagaaaccagagaaggagaagaaaaaaaagatgaagaatgagaacgcagacaagttacttaagagtgaaaagcaaatgaagaagtctgagaaaaagagcaagcaagagaaagagaagagcaagaagaaaaaaggaggtaaaacagaacaggatggctatcagaaacccaccaacaaacacttcacgcagagtcccaagaagtcagtggccgacctgctggggtcctttgaaggcaaacgaagactccttctgatcactgctcccaaggctgagaacaatatgtatgtgcaacaacgtgatgaatatctggaaagtttctgcaagatggctaccaggaaaatctctgtgatcaccatcttcggccctgtcaacaacagcaccatgaaaatcgaccactttcagctagataatgagaagcccatgcgagtggtggatgatgaagacttggtagaccagcgtctcatcagcgagctgaggaaagagtacggaatgacctacaatgacttcttcatggtgctaacagatgtggatctgagagtcaagcaatactatgaggtaccaataacaatgaagtctgtgtttgatctgatcgatactttccagtcccgaatcaaagatatggagaagcagaagaaggagggcattgtttgcaaagaggacaaaaagcagtccctggagaacttcctatccaggttccggtggaggaggaggttgctggtgatctctgctcctaacgatgaagactgggcctattcacagcagctctctgccctcagtggtcaggcgtgcaattttggtctgcgccacataaccattctgaagcttttaggcgttggagaggaagttgggggagtgttagaactgttcccaattaatgggagctctgttgttgagcgagaagacgtaccagcccatttggtgaaagacattcgtaactattttcaagtgagcccggagtacttctccatgcttctagtcggaaaagacggaaatgtcaaatcctggtatccttccccaatgtggtccatggtgattgtgtacgatttaattgattcgatgcaacttcggagacaggaaatggcgattcagcagtcactggggatgcgctgcccagaagatgagtatgcaggctatggttaccatagttaccaccaaggataccaggatggttaccaggatgactaccgtcatcatgagagttatcaccatggatacccttactgagcagaaatatgtaaccttagactcagccagtttcctctgcagctgctaaaactacatgtggccagctccattcttccacactgcgtactacatttcctgcctttttctttcagtgtttttctaagactaaataaatagcaaactttcacctattcatgagttattattgaaacctcaaatcataaagacatttaaaagaattgtttttctaactggaggggctctagtgctaaataatagtactgaaaattgatattattttccttttcttatatgaaggaccttatttggcatataaaattttataaaatatgtaaaaaaa

SEQ ID NO: 329 - DNA, 3074 bp, Homo sapiens
gaattccggggagcaggaagagccaacatgctggccccgcgcggagccgccgtcctcctgctgcacctggtcctgcagcggtggctagcggcaggcgcccaggccaccccccaggtctttgaccttctcccatcttccagtcagaggctaaacccaggcgctctgctgccagtcctgacagaccccgccctgaatgatctctatgtgatttccaccttcaagctgcagactaaaagttcagccaccatcttcggtctttactcttcaactgacaacagtaaatattttgaatttactgtgatgggacgcttaagcaaagccatcctccgttacctgaagaacgatgggaaggtgcatttggtggttttcaacaacctgcagctggcagacggaaggcggcacaggatcctcctgaggctgagcaatttgcagcgaggggccggctccctagagctctacctggactgcatccaggtggattccgttcacaatctccccagggcctttgctggcccctcccagaaacctgagaccattgaattgaggactttccagaggaagccacaggacttcttggaagagctgaagctggtggtgagaggctcactgttccaggtggccagcctgcaagactgcttcctgcagcagagtgagccactggctgccacaggcacaggggactttaaccggcagttcttgggtcaaatgacacaattaaaccaactcctgggagaggtgaaggaccttctgagacagcaggttaaggaaacatcatttttgcgaaacaccatagctgaatgccaggcttgcggtcctctcaagtttcagtctccgaccccaagcacggtggtcgccccggctccccctgcaccgccaacacgcccacctcgtcggtgtgactccaacccatgtttccgaggtgtccaatgtaccgacagtagagatggcttccagtgtgggccctgccccgagggctacacaggaaacgggatcacctgtattgatgttgatgagtgcaaataccatccctgctacccgggcgtgcactgcataaatttgtctcctggcttcagatgtgacgcctgcccagtgggcttcacagggcccatggtgcagggtgttgggatcagttttgccaagtcaaacaagcaggtctgcactgacattgatgagtgtcgaaatggagcgtgcgttcccaactcgatctgcgttaatactttgggatcttaccgctgtgggccttgtaagccggggtatactggtgatcagataaggggatgcaaagtggaaagaaactgcagaaacccagagctgaacccttgcagtgtgaatgcccagtgcattgaagagaggcagggggatgtgacatgtgtgtgtggagtcggttgggctggagatggctatatctgtggaaaggatgtggacatcgacagttaccccgacgaagaactgccatgctctgccaggaactgtaaaaaggacaactgcaaatatgtgccaaattctggccaagaagatgcagacagagatggcattggcgacgcttgtgacgaggatgctgacggagatgggatcctgaatgagcaggataactgtgtcctgattcataatgtggaccaaaggaacagcgataaagatatctttggggatgcctgtgataactgcctgagtgtcttaaataacgaccagaaagacaccgatggggatggaagaggagatgcctgtgatgatgacatggatggagatggaataaaaaacattctggacaactgcccaaaatttcccaatcgtgaccaacgggacaaggatggtgatggtgtgggggatgcctgtgacagttgtcctgatgtcagcaaccctaaccagtctgatgtggataatgatctggttggggactcctgtgacaccaatcaggacagtgatggagatgggcaccaggacagcacagacaactgccccaccgtcattaacagtgcccagctggacaccgataaggatggaattggtgacgagtgtgatgatgatgatgacaatgatggtatcccagacctggtgccccctggaccagacaactgccggctggtccccaacccagcccaggaggatagcaacagcgacggagtgggagacatctgtgagtctgactttgaccaggaccaggtcatcgatcggatcgacgtctgcccagagaacgcagaggtcaccctgaccgacttcagggcttaccagaccgtgggcctggatcctgaaggggatgcccagatcgatcccaactgggtggtcctgaaccagggcatggagattgtacagaccatgaacagtgatcctggcctggcagtggggtacacagcttttaatggagttgacttcgaagggaccttccatgtgaatacccagacagatgatgactatgcaggctttatctttggctaccaagatagctccagcttctacgtggtcatgtggaagcagacggagcagacatattggcaagccaccccattccgagcagttgcagaacctggcattcagctcaaggctgtgaagtctaagacaggtccaggggagcatctccggaactccctgtggcacacgggggacaccagtgaccaggtcaggctgctgtggaaggactccaggaatgtgggctggaaggacaaggtgtcctaccgctggttcctacagcacaggccccaggtgggctacatcagggtacgattttatgaaggctctgagttggtggctgactctggcgtcaccatagacaccacaatgcgtggaggccgacttggcgttttctgcttctctcaagaaaacatcatctggtccaacctcaagtatcgctgcaatgacaccatccctgaggacttccaagagtttcaaacccagaatttcgaccgcttcgataattaaaccaaggaagcaatctgtaactgcttttcggaacactaaaaccatatatattttaacttcaattttctttagcttttaccaacccaaatatatcaaaacgttttatgtgaatgtggcaataaaggagaagagatcatttttaaaaaaaaaaaaaaaaaaaa

SEQ ID NO: 330 - DNA, 2589 bp, Homo sapiens
tataacagtgccactctcaggaattactaagtgacattttaaattgatattttaaactctttccaactacatagttatggtttatttcattctcatcctgttgggatgagaacttgtttgtgcctttcataacttgtttaaagcagagttttaaaattagtttataggatctgaggtggctattagttacagtggcaagattatttagaaagcaagattttgatgagaattaaaaacaatagaaaatgtagagtgcttaaacaaaaatgttatattttgaaagagtagatacttaatttataaataacagtctgaaggttgatgctattttgggataattgttttgctaatggataattctaacaacgcagaatacctagtcaagactgtcatcaaaaacattcacaaatgtttcattctatttttagtgactctgtttaaagagtttctgaaaggaaagaaattttttatttttattatctttagcagtactgagtgtcatagcagaatattttacagactttctatgagattatttttatggtacaaagtatttacatttccctcatgtttatcattatgccaattttacatggcagtcatgccactgactctgctatttagctaagtaatttcttttttcggagactgtctcactctgtctcccaggctggactgcagtggtgcgattctcctgcctcagcctcccgagtagcggggattacaggcacgcgctgccacgccccgccagttttcatatttttagtagagacagggttttgccgtgttggccaggctggtcttgaactcctgacctcaggtgatccacccaccttggcatcccaaagtgctgggattacgagcgtgagtcacagcacccggctaagtaatttctatttattgtgccaaaacatgtcaaaatcatgacctctttgaatggtatatttgagaggatattcatttcattggttaaccatggactactctgtccacgtagtgaaaacatgcaccagtttttacctattatcatggtagtatcatctgccaaaatttcaaggcattcattttattctttgaacaactcttcaccatggtgtggacatgaattttcatatgtgttacttgactagaagtataaatggtttactatagatatccaaaaaccttgagatttgctcataggaaatgaatattgtgatgaatcctgggctctagagtcagacttgcttgggtttaaattcttgctctaacacttactgtttttgtaaccttgagcaattttaatctctctgtgtctcaatttcctcatcttttaattagggatgataatactacctacctcacaggatttttatgaggattaaataaatgtaaggtttttagaacattgatagggagcaataaatagaagattgtattattattctgttaccttggagtgtaagtactgcatttaagtgaatgaaaaatttgctttgaccagatactgaaggaaataagtaatagctagtatttatccaatgccaactgtatgctaggtactgtgcttagataatctgtgtataatagtgttaatcctcaaaatttgggtgttatacccctattatagatgaggaaactgaggctcagagaattaaagtaactttatcactgtcacaaagctagtaagtaacagaggtaggatttatattcaaaaccctgtgtgttcattggaaccgtatcaggcttggggctattcatgtagcattatttccatttttatgtatatgatatatgacgtctgatgcattggccagtaatagtcaaattaacccagccaaattgtcacagtgattcttaaactgtggttctcacacttgcccaggatgttgttaaatgcagatctgaagaccccaatctcagaaactcaaatttaagcatggggcccaagagtatgcattcttaccagataccttgggcagtgactgtcaaaagtttggtcccaacaaacagcattaacgtcacctgggaacttgttggaaatgcagcctctctcagggcctcatctcagatcagatctactaaatcagatactctaggggcaggggcaggggcaggggctagcagttgtgtttaagcaaactctgcaggtgtctttcttatcctagtttgagaaccaatacccaacaacctacgtgattttggtgcaagtagtgtttgaaacacactgaagattactgccctattactaagacatttctcaaaaagcatgttttaaatcagtgtagtccaggatcacactatattaaatataaagataacttaaaggatcattggatcattcattttggccaaatttttagcttctccaaagtgactaacatcagggcctacaataaaatctgtaattctccaagtttagtaattttatattgaggcaggaagggctcattaagtactaataagtacataatttattaaaaacatacataagtgtcatcaaaaaggtccacaattgttagtaaaaaaaattaaattgaagtagtaaatgctgttttataacatacatttttctgctaattcattctgttttgtgtgacctaataaagc

SEQ ID NO: 331 - DNA, 970 bp, Homo sapiens
gtgatatatatttttttaaactggtacagagaagtgaaaagattaaattctacttctatttttctttttttttttttgaaacggagtctcgctctgtcaccaaggccggagtgcagtggtgcgatctcggctcactgcaagctccgcctcccaggttcacgtcattctcctgcctcagcctcccgactagctgggactacaggcgcccaccaccacgcccggctaattttttggtatttttagtagagacggggtttcaccatgttagccaggatggtctcaatctcctgacctcatgatccgcccgtctgtggcctcccaaagtgctgggattacaggcatgagcaactgcgcccagccaaattctacttcttaaaaatcacaaaaactagtttaaattgatgacttgttcgtatgttcaaacatgtaacaacaaaaaaagctaacaccagtcatttatattaactttttttttaaatcaaaaaatggttaatgttagaaacatactatgaagtgcctttatctgcttagacctaaggaagattttaacagtggggttgcacaggaaatgatgatgctccaatttcttaatagttaaaaagtgctaaatactacttgacattatggtttacagattagtgacaagagcctgggtaaggaccggtggactctgacatcggatgccctcaaaattaagaaactttcaaactcagtcagccataagctatttgccacctgtccgagtcatccggattcgatggaagccacttgatcgactgtctccaacccactacacccttttttaaacaaaaaagggcgggctaaaaccgagggccactacgtccctttgtaaggcccaggaggttaagagagcgcggcaccacgcggacccagcggctccgaagccccgtcggatgcccccaaccgaaaagattcctctgggtatatctgcaactccgagctccttata

SEQ ID NO: 332 - DNA, 2880 bp, Homo sapiens
gtcttgaggaatgcggtcgcccccttgggaaagtacatatctgggagaagcaggcggctccgcgctcgcactcccgctcctccgcccgaccgcgcgctcgccccgccgctcctgctgcagccccagggcccctcgccgccgccaccatggacgccatcaagaagaagatgcagatgctgaagctcgacaaggagaacgccttggatcgagctgagcaggcggaggccgacaagaaggcggcggaagacaggagcaagcaggtctgcgcctccccggccctgcgcccgcgcccagagcgccgggactcgagcctggcacccccggctggatccccaccccgaggactcggggagccaccaccctacccccaccaccacccagggcggccagggcgcgcgtctggaaagaaggaagggaaacgcaagagccaggcttagtctaacttagtctggtctgaggacgcttatttcccttctctggttcccatggcccgcgaaatcaagtcctagaggcgctttattctcaggactgggaatcagtttgggggagggaggaggacacccggttcctggggacgtttgaaggaagggcgagggatggagaaagggggtcgagtaactcaagtgttagaagttcgttgacttttgactggggagaaaggaaccttaaacttggggaggagaagggagtcctggagttgttacctaagaacaaagatggggcggaatggaggctacagcccgaaagccaggccagcagtggcgttcttctgtgtccccaagtagtggacttgagcccgctgagacctcggcaggagtctcgtcccagggcaggtgggtgtgcggggtgagccgcggagcggttccagctcgggtaaagaggaagttacctcgggtcctttgcactccaactcggcggcgccccgagcccgaggggccccagccaacccgacgcccgtgtgttgtgtgtgtctaacacccggtccgtgccggccgcccgcgcccgcccgccgctgcccccagctcgaggaggacatcgcggccaaggagaagttgctgcgggtgtcggaggacgagcgggaccgggtgctggaggagctgcacaaggcggaggacagcctcctggccgccgaagaggccgccgccaaggctgaagccgacgtagcttctctgaacagacgcatccagctggttgaggaagagttggatcgtgcccaggagcgtctggcaacagctttgcagaagctggaggaagctgagaaggcagcagatgagagtgagagaggcatgaaagtcattgagagtcgagcccaaaaagatgaagaaaaaatggaaattcaggagatccaactgaaagaggcaaagcacattgctgaagatgccgaccgcaaatatgaagaggtggcccgtaagctggtcatcattgagagcgacctggaacgtgcagaggagcgggctgagctctcagaaggccaagtccgacagctggaagaacaattaagaataatggatcagaccttgaaagcattaatggctgcagaggataaggtactgatggctcgtgtggtttttaggtttaactgcaacccagacatctttcagcttccaatgcctcctggttcgtttggtataacgactgcaccttcacttcaccctctgctatttatatcttgccttaagtgctttcccttggtcctttatgctcctttgttttcccttcataaatgctctttgggcagccaaaaaaggagccaaattatcgcacttcaaagttgttggatttggtcaccctgccttctgctgttgcgaggttggggggcagtgttcctggaaaaactaaacattttaatacctgatgatttggctactttaaggcagcccttcgtctctaggactcagttttcattttttcccatccctctcctttttctctcctccttcctttggcttgtctcccaccctttctgcctctgatcgaaaacattagcaaatgtgccgagcttgaagaagaattgaaaactgtgacgaacaacttgaagtcactggaggctcaggctgagaaggtaggccaggaggatggtgtgggggaaaggcatcttttaagagctgctcaaaagaggccctgccagaaagcaacacttacagtagacattttagtaaaatggcaatattgtgaggtgatttttggagagttactagataacaaattcttttttttaactagagaatttattttatgttagggatatgaggcatcaatttaatttaaaccaagtgccaagtggataagttatcttgttgttatcccatgtaaaacaataggcaagaaagcagagaatgtattgcagtgtgccatttgatatcagaggttccattacctcctaagagatccttaacatctgttggctgagctggcgagttctttgcatgagaagccatgagtagattgagctgcagcctgacatctggaatgctctttctaattacagtactcgcagaaggaagacagatatgaggaagagatcaaggtcctttccgacaagctgaaggaggctgagactcgggctgagtttgcggagaggtcagtaactaaattggagaaaagcattgatgacttagaagagaaagtggctcatgccaaagaagaaaaccttagtatgcatcagatgctggatcagactttactggagttaaacaacatgtgaaaacctccttagctgcgaccacattctttcattttgttttgttttgttttgttttgtttttaaacacctgcttaccccttaaatgcaatttatttacttttaccactgtcacagaaacatccacaagataccagctaggtcagggggtggggaaaacacattgtaggacattttct

SEQ ID NO: 333 - DNA, 2894 bp, Homo sapiens
ggagaccgcgtctgcttcaacttgggccgtgagctctatttctacccaggctgctgtcgtcgtgggagccaacggtccattgacctcaacaagccaattgacaagcggatctacaagggcacccagcccacctgccacgatttcaaccagttcactgctgccaccgagaccatctcgctgctggtgggcttctcagcgggtcaagtgcagtacctggatctcatcaaaaaggacaccagcaagctgttcaatgaggagcggttgatcgacaagaccaaggtgacatatctgaagtggctgcctgagtcggagagcctgttcctggcatcacacgccagtggccacctgtacctgtacaacgtcagccacccctgcgcctcggccccgccccagtacagcctgctgaagcagggcgagggcttctctgtctatgctgccaagagcaaggcaccccgcaacccgctggccaagtgggcggtgggtgagggtcccctcaacgagttcgccttctcgcccgatggccggcacctggcctgtgtgagccaggatgcgtgcctgcgcgtcttccacttcgactccatgctcctgcgtgggctcatgaagagctactttgggggcctgctgtgtgtgtgctggagccctgacggccgctacgtggtgacgggtggcgaagatgacctggtcaccgtgtggtccttcaccgagggccgcgtggtggctcgaggccatggccacaagtcctgggtcaacgctgtggcctttgactctctctacaccacaagggcagaggaggcggcgacagcagccggtgctgatggggagcggagcggcgaagaggaggaggaggagcccgaggctgcgggcacaggctcggccgggggcgccccactctctccactgcccaaggctggctccattacttaccgctttggctcggcgggccaggacacgcagttctgcctgtgggacctcactgaagacgtgctctacccgcacccgcccctggcccgcacccgcaccctccctggcacacctggcaccacgccaccggccgccagcagctcgaggggtggcgagcctggcccaggccccctgcctcgctcgctgtcccgctccaacagtctcccgcacccagctggcgggggcaaggcgggcggcccgggtgtggcggcagagcctggcacaccattcagcattggccgcttcgccacgctcacactgcaggagcggcgggaccggggggcagagaaggagcacaagcgctaccacagcctgggcaacatcagccggggtggcagtggcggcagtggcagtggtggggagaagcccagcggccctgttccccgcagccgcctggaccccgccaaggtgctgggcactgcgctgtgcccgcgcatccacgaggtgcccctgctggagccccttgtgtgcaagaagatcgcccaggagcggctcacagtcctcctgttcctggaggactgcatcatcactgcctgccaggagggcctcatctgcacctggccgcggccgggcaaggcgttcacagacgaggagaccgaggcccagacaggggaaggaagttggcccaggtcacccagcaagtcagtggtagagggcatctcctcccaaccaggcaactccccgagtggcacagtggtgtgaagccatggatatcgggcccccccaaccccatgcccccagcctcctagccataaccctccctgctgacctcacagatcaacgtattaacaagactaaccatgatggatggactgctccagtccccccacctgcacaaaatttgggggccccccagactggcccggacacgggcgatgtaatagcccttgtggcctcagccttgtcccccacccactgccaagtacaatgacctcttcctctgaaacatcagtgttaccctcatccctgtccccagcatgtgactggtcactcctggggagagactccccgcccctgccacaagagccccaggtctgcagtgtgcccctcagttgagtgggcagggcgggggtggtccagccctcgcccggcccccaccccagctgcccttgctattgtctgtgcttttgaagagtgttaaattatggaagcccctcaggttcctccctgtcccgcaggacctcttatttatactaaagttccctgttttctcagcgggtctgtccccttcggaggagatgatgtagaggacctgtgtgtgtactctgtggttctaggcagtccgctttccccagaggaggagtgcaggcctgctcccagcccagcgcctcccaccccttttcatagcaggaaaagccggagcccagggagggaacggacctgcgagtcacacaactggtgacccacaccagcggctggagcaggaccctcttggggagaagagcatcctgcccgcagccagggcccctcatcaaagtcctcggtgttttttaaattatcagaactgcccaggaccacgtttcccaggccctgcccagctgggactcctcggtccttgcctcctagtttctcaggcctggccctctcaaggcccaggcaccccaggccggttggaggccccgacttccactctggagaaccgtccaccctggaaagaagagctcagattcctcttggctctcggagccgcagggagtgtgtcttcccgcgccaccctccaccccccgaaatgtttctgtttctaatcccagcctgggcaggaatgtggctccccgccaggggccaaggagctattttggggtctcgtttgcccagggagggcttggctccaccactttcctcccccagcctttgggcagcaggtcacccctgttcaggctctgagggtgccccctcctggtcctgtcctcaccaccccttccccacctcctggg

SEQ ID NO: 334 - DNA, 4989 bp, Homo sapiens
ttttttttttttttgagaaagggaatttcatcccaaataaaaggaatgaagtctggctccggaggagggtccccgacctcgctgtgggggctcctgtttctctccgccgcgctctcgctctggccgacgagtggagaaatctgcgggccaggcatcgacatccgcaacgactatcagcagctgaagcgcctggagaactgcacggtgatcgagggctacctccacatcctgctcatctccaaggccgaggactaccgcagctaccgcttccccaagctcacggtcattaccgagtacttgctgctgttccgagtggctggcctcgagagcctcggagacctcttccccaacctcacggtcatccgcggctggaaactcttctacaactacgccctggtcatcttcgagatgaccaatctcaaggatattgggctttacaacctgaggaacattactcggggggccatcaggattgagaaaaatgctgacctctgttacctctccactgtggactggtccctgatcctggatgcggtgtccaataactacattgtggggaataagcccccaaaggaatgtggggacctgtgtccagggaccatggaggagaagccgatgtgtgagaagaccaccatcaacaatgagtacaactaccgctgctggaccacaaaccgctgccagaaaatgtgcccaagcacgtgtgggaagcgggcgtgcaccgagaacaatgagtgctgccaccccgagtgcctgggcagctgcagcgcgcctgacaacgacacggcctgtgtagcttgccgccactactactatgccggtgtctgtgtgcctgcctgcccgcccaacacctacaggtttgagggctggcgctgtgtggaccgtgacttctgcgccaacatcctcagcgccgagagcagcgactccgaggggtttgtgatccacgacggcgagtgcatgcaggagtgcccctcgggcttcatccgcaacggcagccagagcatgtactgcatcccttgtgaaggtccttgcccgaaggtctgtgaggaagaaaagaaaacaaagaccattgattctgttacttctgctcagatgctccaaggatgcaccatcttcaagggcaatttgctcattaacatccgacgggggaataacattgcttcagagctggagaacttcatggggctcatcgaggtggtgacgggctacgtgaagatccgccattctcatgccttggtctccttgtccttcctaaaaaaccttcgcctcatcctaggagaggagcagctagaagggaattactccttctacgtcctcgacaaccagaacttgcagcaactgtgggactgggaccaccgcaacctgaccatcaaagcagggaaaatgtactttgctttcaatcccaaattatgtgtttccgaaatttaccgcatggaggaagtgacggggactaaagggcgccaaagcaaaggggacataaacaccaggaacaacggggagagagcctcctgtgaaagtgacgtcctgcatttcacctccaccaccacgtcgaagaatcgcatcatcataacctggcaccggtaccggccccctgactacagggatctcatcagcttcaccgtttactacaaggaagcaccctttaagaatgtcacagagtatgatgggcaggatgcctgcggctccaacagctggaacatggtggacgtggacctcccgcccaacaaggacgtggagcccggcatcttactacatgggctgaagccctggactcagtacgccgtttacgtcaaggctgtgaccctcaccatggtggagaacgaccatatccgtggggccaagagtgagatcttgtacattcgcaccaatgcttcagttccttccattcccttggacgttctttcagcatcgaactcctcttctcagttaatcgtgaagtggaaccctccctctctgcccaacggcaacctgagttactacattgtgcgctggcagcggcagcctcaggacggctacctttaccggcacaattactgctccaaagacaaaatccccatcaggaagtatgccgacggcaccatcgacattgaggaggtcacagagaaccccaagactgaggtgtgtggtggggagaaagggccttgctgcgcctgccccaaaactgaagccgagaagcaggccgagaaggaggaggctgaataccgcaaagtctttgagaatttcctgcacaactccatcttcgtgcccagacctgaaaggaagcggagagatgtcatgcaagtggccaacaccaccatgtccagccgaagcaggaacaccacggccgcagacacctacaacatcaccgacccggaagagctggagacagagtaccctttctttgagagcagagtggataacaaggagagaactgtcatttctaaccttcggcctttcacattgtaccgcatcgatatccacagctgcaaccacgaggctgagaagctgggctgcagcgcctccaacttcgtctttgcaaggactatgcccgcagaaggagcagatgacattcctgggccagtgacctgggagccaaggcctgaaaactccatctttttaaagtggccggaacctgagaatcccaatggattgattctaatgtatgaaataaaatacggatcacaagttgaggatcagcgagaatgtgtgtccagacaggaatacaggaagtatggaggggccaagctaaaccggctaaacccggggaactacacagcccggattcaggccacatctctctctgggaatgggtcgtggacagatcctgtgttcttctatgtccaggccaaaacaggatatgaaaacttcatccatctgatcatcgctctgcccgtcgctgtcctgttgatcgtgggagggttggtgattatgctgtacgtcttccatagaaagagaaataacagcaggctggggaatggagtgctgtatgcctctgtgaacccggagtacttcagcgctgctgatgtgtacgttcctgatgagtgggaggtggctcgggagaagatcaccatgagccgggaacttgggcaggggtcgtttgggatggtctatgaaggagttgccaagggtgtggtgaaagatgaacctgaaaccagagtggccattaaaacagtgaacgaggccgcaagcatgcgtgagaggattgagtttctcaacgaagcttctgtgatgaaggagttcaattgtcaccatgtggtgcgattgctgggtgtggtgtcccaaggccagccaacactggtcatcatggaactgatgacacggggcgatctcaaaagttatctccggtctctgaggccagaaatggagaataatccagtcctagcacctccaagcctgagcaagatgattcagatggccggagagattgcagacggcatggcatacctcaacgccaataagttcgtccacagagaccttgctgcccggaattgcatggtagccgaagatttcacagtcaaaatcggagattttggtatgacgcgagatatctatgagacagactattaccggaaaggaggcaaagggctgctgcccgtgcgctggatgtctcctgagtccctcaaggatggagtcttcaccacttactcggacgtctggtccttcggggtcgtcctctgggagatcgccacactggccgagcagccctaccagggcttgtccaacgagcaagtccttcgcttcgtcatggagggcggccttctggacaagccagacaactgtcctgacatgctgtttgaactgatgcgcatgtgctggcagtataaccccaagatgaggccttccttcctggagatcatcagcagcatcaaagaggagatggagcctggcttccgggaggtctccttctactacagcgaggagaacaagctgcccgagccggaggagctggacctggagccagagaacatggagagcgtccccctggacccctcggcctcctcgtcctccctgccactgcccgacagacactcaggacacaaggccgagaacggccccggccctggggtgctggtcctccgcgccagcttcgacgagagacagccttacgcccacatgaacgggggccgcaagaacgagcgggccttgccgctgccccagtcttcgacctgctgatccttggatcctgaatctgtgcaaacagtaacgtgtgcgcacgcgcagcggggtggggggggagagagagttttaacaatccattcacaagcctcctgtacctcagtggatcttcagttctgcccttgctgcccgcgggagacagcttctctgcagtaaaacacatttgggatgttccttttttcaatatgcaagcagctttttattccctgcccaaacccttaactgacatgggcctttaagaaccttaatgacaacacttaatagcaacagagcacttgagaaccagtctcctcactctgtccctgtccttccctgttctccctttctctctcctctctgcttcataacggaaaaataattgccacaagtccagctgggaagccctttttatcagtttgaggaagtggctgtccctgtggccccatccaaccactgtacacacccgcctgacaccgtgggtcattacaaaaaaacacgtggagatggaaatttttacctttatctttcacctttctagggacatgaaatttacaaagggccatcgttcatccaaggctgttaccattttaacgctgcctaattttgccaaaatcctgaactttctccctcatcggcccggcgctgattcctcgtgtccggaggcatgggtgagcatggcagctggttgctccatttgagagacacgctggcgacacactccgtccatccgactgcccctgctgtgctgctcaaggccacaggcacacaggtctcattgcttctgactagattattatttgggggaactggacacaataggtctttctctcagtgaaggtggggagaagctgaaccggc

SEQ ID NO: 335 - DNA, 2295 bp, Homo sapiens
gaattccaactatggagacccaaatgtctcagaatgtatgtcccagaaacctgtggctgcttcaaccattgacagttttgctgctgctggcttctgcagacagtcaagctgcagctcccccaaaggctgtgctgaaacttgagcccccgtggatcaacgtgctccaggaggactctgtgactctgacatgccagggggctcgcagccctgagagcgactccattcagtggttccacaatgggaatctcattcccacccacacgcagcccagctacaggttcaaggccaacaacaatgacagcggggagtacacgtgccagactggccagaccagcctcagcgaccctgtgcatctgactgtgctttccgaatggctggtgctccagacccctcacctggagttccaggagggagaaaccatcatgctgaggtgccacagctggaaggacaagcctctggtcaaggtcacattcttccagaatggaaaatcccagaaattctcccgtttggatcccaccttctccatcccacaagcaaaccacagtcacagtggtgattaccactgcacaggaaacataggctacacgctgttctcatccaagcctgtgaccatcactgtccaagtgcccagcatgggcagctcttcaccaatggggatcattgtggctgtggtcattgcgactgctgtagcagccattgttgctgctgtagtggccttgatctactgcaggaaaaagcggatttcagccaattccactgatcctgtgaaggctgcccaatttgagccacctggacgtcaaatgattgccatcagaaagagacaacttgaagaaaccaacaatgactatgaaacagctgacggcggctacatgactctgaaccccagggcacctactgacgatgataaaaacatctacctgactcttcctcccaacgaccatgtcaacagtaataactaaagagtaacgttatgccatgtggtcatactctcagcttgctgagtggatgacaaaaagaggggaattgttaaaggaaaatttaaatggagactggaaaaatcctgagcaaacaaaaccacctggcccttagaaatagctttaactttgcttaaactacaaacacaagcaaaacttcacggggtcatactacatacaagcataagcaaaacttaacttggatcatttctggtaaatgcttatgttagaaataagacaaccccagccaatcacaagcagcctactaacatataattaggtgactagggactttctaagaagatacctacccccaaaaaacaattatgtaattgaaaaccaaccgattgcctttattttgcttccacattttcccaataaatacttgcctgtgacattttgccactggaacactaaacttcatgaattgcgcctcagatttttcctttaacatcttttttttttttgacagagtctcaatctgttacccaggctggagtgcagtggtgctatcttggctcactgcaaacccgcctcccaggtttaagcgattctcatgcctcagcctcccagtagctgggattagaggcatgtgccatcatacccagctaatttttgtattttttattttttttttttagtagagacagggtttcgcaatgttggccaggccgatctcgaacttctggcctctagcgatctgcccgcctcggcctcccaaagtgctgggatgaccagcatcagccccaatgtccagcctctttaacatcttctttcctatgccctctctgtggatccctactgctggtttctgccttctccatgctgagaacaaaatcacctattcactgcttatgcagtcggaagctccagaagaacaaagagcccaattaccagaaccacattaagtctccattgttttgccttgggatttgagaagagaattagagaggtgaggatctggtatttcctggactaaattccccttggggaagacgaagggatgctgcagttccaaaagagaaggactcttccagagtcatctacctgagtcccaaagctccctgtcctgaaagccacagacaatatggtcccaaatgactgactgcaccttctgtgcctcagccgttcttgacatcaagaatcttctgttccacatccacacagccaatacaattagtcaaaccactgttattaacagatgtagcaacatgaaagacgctatgttacaggttacatgagagcaatcatgtaagtctatatgacttcagaaatgttaaaatagactaacctctaacaacaaattaaaagtgcggaattc

SEQ ID NO: 336 - DNA, 1264 bp, Homo sapiens
atggaatcctgctcacaaaatcactttaagatcttttcgaagctgttaatttttcttagtgttgtggacactgcagacttgtccagtgctcccacggcctgtacggacactgtggaaggcctccctctgtcggctttttgccatctgtgatatgccataggtgtgacaatccgagcagtggagtcattcagcgggagcactgcgcgctatcccctcacattctctatgtactatgtatgtatgtattattattattgctgccaagagggtctgatggcacgttgtggggtcggggggtggggcggggaagtgctctaacttttcttaaggttttgttgctagcccttcaagtgcactgagctatgtgactcggatggtctttcacacggcacatttggacatttccagaactaccatgagatggtttagacgggaattcatgcaaatgaggggtcaaaaatggtatagtgaccccgtccacgtcctccaagctcacgaccttggagccccgtggagctggactgaggaggaggctgcacagcgggagagcagctggtccagaccagccctgcagcccccactcagccggcagccagatggccccgcaaggcctccagggatggcccctagccacaggccctggctgaggtctctgggtcggtcagtgacatgtaggtaggaagcactgaaaatagtgttcccagagcactttgcaactccctgggtaagagggacgacacctctggtttttcaataccaattacatggaacttttctgtaatgggtacaatgaagaagtttctaaaaacacacacaaagcacattgggccaactatttagtaagcccggatagacttattgccaaaaacaaaaaatagctttcaaaagaaatttaagttctatgagaaattccttagtcatggtgttgcgtaaatcatattttagctgcacggcattaccccacacagggtggcagaacttgaagggttactgacgtgtaaatgctggtatttgatttcctgtgtgtgttgccctggcattaagggcattttacccttgcagttttactaaaacactgaaaaatattccaagcttcatattaaccctacctgtcaacgtaacgatttcatgaacgttattatattgtcgaattcctactgacaacattataactgtatgggagcttaactttataaggaaatgtattttgacactggtatcttattaaagtattctgatcctaaaaaaaaaaaaaaaaaaaaaa

SEQ ID NO: 337 - DNA, 2281 bp, Homo sapiens
ggacagaaaactccctccttttccaagttagccttatagtctagggcttaaaatactggtttaatggtgaaggtaagtgcttttcttctttttgggtagaaggattattactaacttaccaaaggtccattaaggggagggaacagttttaggagaagtcagagaaaagacattaacagcaacataaggatctccatctggtaatattgcctaattccaaaatgaagagactctctgaaaaagataactgattcaatgaagaccctagggcaaggcttgagaagccactggtaccaatggacactgtggacaatggtcatttctccaaggacgctataaaagactgtcgtagtaaaagagattcagggcacagggaaactccaccacaaagcgtggtaccatttcccacagaagctaaatggacgggaagcctgccaccaggaaaggtccagatttctgttcattacgctatgggctggctcttatcatgcacttctcaaacttcaccatgataacgcagcgtgtgagtctgagcattgcgatcatcgccatggtgaacaccactcagcagcaaggtctatctaatgcctccactgaggggcctgttgcagatgccttcaataactccagcatatccatcaaggaatttgatacaaaggcctctgtgtatcaatggagcccagaaactcagggtatcatctttagctccatcaactatgggataatactgactctgatcccaagtggatatttagcagggatatttggagcaaaaaaaatgcttggtgctggtttgctgatctcttcccttctcaccctctttacaccactggctgctgacttcggagtgattttggtcatcatggttcggacagtccagggcatggcccagggaatggcatggacaggtcagtttactatttgggcaaagtgggctcctccacttgaacgaagcaagctcaccaccattgcaggatcagggtcagcatttggatccttcatcatcctctgtgtggggggactaatctcacaggccttgagctggccttttatcttctacatctttggtagcactggctgtgtctgctgtctcctatggttcacagtgatttatgatgaccccatgcatcacccgtgcataagtgttagggaaaaggagcacatcctgtcctcactggctcaacagcccagttctcctggacgagctgtccccataaaggcgatggtcacatgcctaccactttgggccattttcctgggttttttcagccatttctggttatgcaccatcatcctaacatacctaccaacgtatatcagtactctgctccatgttaacatcagagatagtggagttctgtcctccctgccttttattgctgctgcaagctgtacaattttaggaggtcagctggcagatttccttttgtccaggaatcttctcagattgatcactgtgcgaaagctcttttcatctcttgatatgcaagtttcctcatgggaatctcaaggggatttgggctcatcgcaggaatcatctcttccactgccactggattcctcatcagtcaggattttgagtctggttggaggaatgtctttttcctgtctgctgcagtcaacatgtttggcctggtcttttacctcacgtttggacaagcagaacttcaagactgggccaaagagaggacccttacccgcctctgaggacataaagttacaaacttaaatgtggtactgagcatgaactttttaaacattttttacttctctccatattcctgaccatagactcagcagttcttaactctggctgtgtgttagtcttccctggggagcctttataagacactgatacttgggacccactccagagattctgaatgaattggtctggggtggaacccagatactactaatttttagatactccttagaggtttctagcatgcgcccggggttgacaacagctggacaaacttgaaaagtcaattcatgtggcctttgaattttcctcattggaaagtactaaataaataaaaattcatgtgaaaatgatcactgataaatatcttcatggtggggcaggttattggatgcagagaagatctgctcggaattgtagccatatgttacagatctcagcaccgatcagaactgtaaagctataatccccagaattaaagtttttattattttttatacattgtaaaacatagacgtttatttatgtgattaaattctattaaaatttacatgctaaaataaaaaaaaaaaaaaa

SEQ ID NO: 338 - DNA, 5830 bp, Homo sapiens
actgagtcccgggaccccgggagagcggtcagtgtgtggtcgctgcgtttcctctgcctgcgccgggcatcacttgcgcgccgcagaaagtccgtctggcagcctggatatcctctcctaccggcacccgcagacgcccctgcagccgccggtcggcgcccgggctccctagccctgtgcgctcaactgtcctgcgctgcggggtgccgcgagttccacctccgcgcctccttctctagacaggcgctgggagaaagaaccggctcccgagttctgggcatttcgcccggctcgaggtgcaggatgcagagcaaggtgctgctggccgtcgccctgtggctctgcgtggagacccgggccgcctctgtgggtttgcctagtgtttctcttgatctgcccaggctcagcatacaaaaagacatacttacaattaaggctaatacaactcttcaaattacttgcaggggacagagggacttggactggctttggcccaataatcagagtggcagtgagcaaagggtggaggtgactgagtgcagcgatggcctcttctgtaagacactcacaattccaaaagtgatcggaaatgacactggagcctacaagtgcttctaccgggaaactgacttggcctcggtcatttatgtctatgttcaagattacagatctccatttattgcttctgttagtgaccaacatggagtcgtgtacattactgagaacaaaaacaaaactgtggtgattccatgtctcgggtccatttcaaatctcaacgtgtcactttgtgcaagatacccagaaaagagatttgttcctgatggtaacagaatttcctgggacagcaagaagggctttactattcccagctacatgatcagctatgctggcatggtcttctgtgaagcaaaaattaatgatgaaagttaccagtctattatgtacatagttgtcgttgtagggtataggatttatgatgtggttctgagtccgtctcatggaattgaactatctgttggagaaaagcttgtcttaaattgtacagcaagaactgaactaaatgtggggattgacttcaactgggaatacccttcttcgaagcatcagcataagaaacttgtaaaccgagacctaaaaacccagtctgggagtgagatgaagaaatttttgagcaccttaactatagatggtgtaacccggagtgaccaaggattgtacacctgtgcagcatccagtgggctgatgaccaagaagaacagcacatttgtcagggtccatgaaaaaccttttgttgcttttggaagtggcatggaatctctggtggaagccacggtgggggagcgtgtcagaatccctgcgaagtaccttggttacccacccccagaaataaaatggtataaaaatggaataccccttgagtccaatcacacaattaaagcggggcatgtactgacgattatggaagtgagtgaaagagacacaggaaattacactgtcatccttaccaatcccatttcaaaggagaagcagagccatgtggtctctctggttgtgtatgtcccaccccagattggtgagaaatctctaatctctcctgtggattcctaccagtacggcaccactcaaacgctgacatgtacggtctatgccattcctcccccgcatcacatccactggtattggcagttggaggaagagtgcgccaacgagcccagccaagctgtctcagtgacaaacccatacccttgtgaagaatggagaagtgtggaggacttccagggaggaaataaaattgaagttaataaaaatcaatttgctctaattgaaggaaaaaacaaaactgtaagtacccttgttatccaagcggcaaatgtgtcagctttgtacaaatgtgaagcggtcaacaaagtcgggagaggagagagggtgatctccttccacgtgaccaggggtcctgaaattactttgcaacctgacatgcagcccactgagcaggagagcgtgtctttgtggtgcactgcagacagatctacgtttgagaacctcacatggtacaagcttggcccacagcctctgccaatccatgtgggagagttgcccacacctgtttgcaagaacttggatactctttggaaattgaatgccaccatgttctctaatagcacaaatgacattttgatcatggagcttaagaatgcatccttgcaggaccaaggagactatgtctgccttgctcaagacaggaagaccaagaaaagacattgcgtggtcaggcagctcacagtcctagagcgtgtggcacccacgatcacaggaaacctggagaatcagacgacaagtattggggaaagcatcgaagtctcatgcacggcatctgggaatccccctccacagatcatgtggtttaaagataatgagacccttgtagaagactcaggcattgtattgaaggatgggaaccggaacctcactatccgcagagtgaggaaggaggacgaaggcctctacacctgccaggcatgcagtgttcttggctgtgcaaaagtggaggcatttttcataatagaaggtgcccaggaaaagacgaacttggaaatcattattctagtaggcacggcggtgattgccatgttcttctggctacttcttgtcatcatcctacggaccgttaagcgggccaatggaggggaactgaagacaggctacttgtccatcgtcatggatccagatgaactcccattggatgaacattgtgaacgactgccttatgatgccagcaaatgggaattccccagagaccggctgaagctaggtaagcctcttggccgtggtgcctttggccaagtgattgaagcagatgcctttggaattgacaagacagcaacttgcaggacagtagcagtcaaaatgttgaaagaaggagcaacacacagtgagcatcgagctctcatgtctgaactcaagatcctcattcatattggtcaccatctcaatgtggtcaaccttctaggtgcctgtaccaagccaggagggccactcatggtgattgtggaattctgcaaatttggaaacctgtccacttacctgaggagcaagagaaatgaatttgtcccctacaagaccaaaggggcacgattccgtcaagggaaagactacgttggagcaatccctgtggatctgaaacggcgcttggacagcatcaccagtagccagagctcagccagctctggatttgtggaggagaagtccctcagtgatgtagaagaagaggaagctcctgaagatctgtataaggacttcctgaccttggagcatctcatctgttacagcttccaagtggctaagggcatggagttcttggcatcgcgaaagtgtatccacagggacctggcggcacgaaatatcctcttatcggagaagaacgtggttaaaatctgtgactttggcttggcccgggatatttataaagatccagattatgtcagaaaaggagatgctcgcctccctttgaaatggatggccccagaaacaatttttgacagagtgtacacaatccagagtgacgtctggtcttttggtgttttgctgtgggaaatattttccttaggtgcttctccatatcctggggtaaagattgatgaagaattttgtaggcgattgaaagaaggaactagaatgagggcccctgattatactacaccagaaatgtaccagaccatgctggactgctggcacggggagcccagtcagagacccacgttttcagagttggtggaacatttgggaaatctcttgcaagctaatgctcagcaggatggcaaagactacattgttcttccgatatcagagactttgagcatggaagaggattctggactctctctgcctacctcacctgtttcctgtatggaggaggaggaagtatgtgaccccaaattccattatgacaacacagcaggaatcagtcagtatctgcagaacagtaagcgaaagagccggcctgtgagtgtaaaaacatttgaagatatcccgttagaagaaccagaagtaaaagtaatcccagatgacaaccagacggacagtggtatggttcttgcctcagaagagctgaaaactttggaagacagaaccaaattatctccatcttttggtggaatggtgcccagcaaaagcagggagtctgtggcatctgaaggctcaaaccagacaagcggctaccagtccggatatcactccgatgacacagacaccaccgtgtactccagtgaggaagcagaacttttaaagctgatagagattggagtgcaaaccggtagcacagcccagattctccagcctgactcggggaccacactgagctctcctcctgtttaaaaggaagcatccacaccccaactcccggacatcacatgagaggtctgctcagattttgaagtgttgttctttccaccagcaggaagtagccgcatttgattttcatttcgacaacagaaaaaggacctcggactgcagggagccagtcttctaggcatatcctggaagaggcttgtgacccaagaatgtgtctgtgtcttctcccagtgttgacctgatcctcttttttcattcatttaaaaagcattatcatgcccctgctgcgggtctcaccatgggtttagaacaaagagcttcaagcaatggccccatcctcaaagaagtagcagtacctggggagctgacacttctgtaaaactagaagataaaccaggcaacgtaagtgttcgaggtgttgaagatgggaaggatttgcagggctgagtctatccaagaggctttgtttaggacgtgggtcccaagccaagccttaagtgtggaattcggattgatagaaaggaagactaacgttaccttgctttggagagtactggagcctgcaaatgcattgtgtttgctctggtggaggtgggcatggggtctgttctgaaatgtaaagggttcagacggggtttctggttttagaaggttgcgtgttcttcgagttgggctaaagtagagttcgttgtgctgtttctgactcctaatgagagttccttccagaccgttagctgtctccttgccaagccccaggaagaaaatgatgcagctctggctccttgtctcccaggctgatcctttattcagaataccacaaagaaaggacattcagctcaaggctccctgccgtgttgaagagttctgactgcacaaaccagcttctggtttcttctggaatgaataccctcatatctgtcctgatgtgatatgtctgagactgaatgcgggaggttcaatgtgaagctgtgtgtggtgtcaaagtttcaggaaggattttacccttttgttcttccccctgtccccaacccactctcaccccgcaacccatcagtattttagttatttggcctctactccagtaaacctgattgggtttgttcactctctgaatgattattagccagacttcaaaattattttatagcccaaattataacatctattgtattatttagacttttaacatatagagctatttctactgatttttgcccttgttctgtcctttttttcaaaaaagaaaatgtgttttttgtttggtaccatagtgtgaaatgctgggaacaatgactataagacatgctatggcacatatatttatagtctgtttatgtagaaacaaatgtaatatattaaagccttatatataatgaactttgtactattcacattttgtatcagtattatgtagcataacaaaggtcataatgctttcagcaattgatgtcattttattaaagaacattgaaaaacttga

SEQ ID NO: 339 - DNA, 4740 bp, Homo sapiens
tggcttccttgtggttcctcagtggtgcctgcaacccctggttcacctccttccaggttctggctccttccagccatggctctcagagtccttctgttaacagccttgaccttatgtcatgggttcaacttggacactgaaaacgcaatgaccttccaagagaacgcaaggggcttcgggcagagcgtggtccagcttcagggatccagggtggtggttggagccccccaggagatagtggctgccaaccaaaggggcagcctctaccagtgcgactacagcacaggctcatgcgagcccatccgcctgcaggtccccgtggaggccgtgaacatgtccctgggcctgtccctggcagccaccaccagcccccctcagctgctggcctgtggtcccaccgtgcaccagacttgcagtgagaacacgtatgtgaaagggctctgcttcctgtttggatccaacctacggcagcagccccagaagttcccagaggccctccgagggtgtcctcaagaggatagtgacattgccttcttgattgatggctctggtagcatcatcccacatgactttcggcggatgaaggagtttgtctcaactgtgatggagcaattaaaaaagtccaaaaccttgttctctttgatgcagtactctgaagaattccggattcactttaccttcaaagagttccagaacaaccctaacccaagatcactggtgaagccaataacgcagctgcttgggcggacacacacggccacgggcatccgcaaagtggtacgagagctgtttaacatcaccaacggagcccgaaagaatgcctttaagatcctagttgtcatcacggatggagaaaagtttggcgatcccttgggatatgaggatgtcatccctgaggcagacagagagggagtcattcgctacgtcattggggtgggagatgccttccgcagtgagaaatcccgccaagagcttaataccatcgcatccaagccgcctcgtgatcacgtgttccaggtgaataactttgaggctctgaagaccattcagaaccagcttcgggagaagatctttgcgatcgagggtactcagacaggaagtagcagctcctttgagcatgagatgtctcaggaaggcttcagcgctgccatcacctctaatggccccttgctgagcactgtggggagctatgactgggctggtggagtctttctatatacatcaaaggagaaaagcaccttcatcaacatgaccagagtggattcagacatgaatgatgcttacttgggttatgctgccgccatcatcttacggaaccgggtgcaaagcctggttctgggggcacctcgatatcagcacatcggcctggtagcgatgttcaggcagaacactggcatgtgggagtccaacgctaatgtcaagggcacccagatcggcgcctacttcggggcctccctctgctccgtggacgtggacagcaacggcagcaccgacctggtcctcatcggggccccccattactacgagcagacccgagggggccaggtgtccgtgtgccccttgcccagggggagggctcggtggcagtgtgatgctgttctctacggggagcagggccaaccctggggccgctttggggcagccctaacagtgctgggggacgtaaatggggacaagctgacggacgtggccattggggccccaggagaggaggacaaccggggtgctgtttacctgtttcacggaacctcaggatctggcatcagcccctcccatagccagcggatagcaggctccaagctctctcccaggctccagtattttggtcagtcactgagtgggggccaggacctcacaatggatggactggtagacctgactgtaggagcccaggggcacgtgctgctgctcaggtcccagccagtactgagagtcaaggcaatcatggagttcaatcccagggaagtggcaaggaatgtatttgagtgtaatgatcaggtggtgaaaggcaaggaagccggagaggtcagagtctgcctccatgtccagaagagcacacgggatcggctaagagaaggacagatccagagtgttgtgacttatgacctggctctggactccggccgcccacattcccgcgccgtcttcaatgagacaaagaacagcacacgcagacagacacaggtcttggggctgacccagacttgtgagaccctgaaactacagttgccgaattgcatcgaggacccagtgagccccattgtgctgcgcctgaacttctctctggtgggaacgccattgtctgctttcgggaacctccggccagtgctggcggaggatgctcagagactcttcacagccttgtttccctttgagaagaattgtggcaatgacaacatctgccaggatgacctcagcatcaccttcagtttcatgagcctggactgcctcgtggtgggtgggccccgggagttcaacgtgacagtgactgtgagaaatgatggtgaggactcctacaggacacaggtcaccttcttcttcccgcttgacctgtcctaccggaaggtgtccacactccagaaccagcgctcacagcgatcctggcgcctggcctgtgagtctgcctcctccaccgaagtgtctggggccttgaagagcaccagctgcagcataaaccaccccatcttcccggaaaactcagaggtcacctttaatatcacgtttgatgtagactctaaggcttcccttggaaacaaactgctcctcaaggccaatgtgaccagtgagaacaacatgcccagaaccaacaaaaccgaattccaactggagctgccggtgaaatatgctgtctacatggtggtcaccagccatggggtctccactaaatatctcaacttcacggcctcagagaataccagtcgggtcatgcagcatcaatatcaggtcagcaacctggggcagaggagcccccccatcagcctggtgttcttggtgcccgtccggctgaaccagactgtcatatgggaccgcccccaggtcaccttctccgagaacctctcgagtacgtgccacaccaaggagcgcttgccctctcactccgactttctggctgagcttcggaaggcccccgtggtgaactgctccatcgctgtctgccagagaatccagtgtgacatcccgttctttggcatccaggaagaattcaatgctaccctcaaaggcaacctctcgtttgactggtacatcaagacctcgcataaccacctcctgatcgtgagcacagctgagatcttgtttaacgattccgtgttcaccctgctgccgggacagggggcgtttgtgaggtcccagacggagaccaaagtggagccgttcgaggtccccaaccccctgccgctcatcgtgggcagctctgtcgggggactgctgctcctggccctcatcaccgccgcgctgtacaagctcggcttcttcaagcggcaatacaaggacatgatgagtgaagggggtcccccgggggccgaaccccagtagcggctccttcccgacagagctgcctctcggtggccagcaggactctgcccagaccacacgagcccccaggctgctggacacgtcggacagcgaagtatccccgacaggacgggcttgggcttccatttgtgtgtgtgcaagtgtgtatgtgcgtgtgtgcgagtgtgtgcaagtgtctgtgtgcaagtgtgtgcacgtgtgcgtgtgcgtgcatgtgcactcgcacgcccatgtgtgagtgtgtgcaagtatgtgagtgtgtccagtgtgtgtgcgtgtgtccatgtgtgtgcagtgtgtgcatgtgtgcgagtgtgtgcatgtgtgtgctcaggggctgtggctcacgtgtgtgactcagagtgtctctggcgtgtgggtaggtgacggcagcgtagcctctccggcagaagggaactgcctgggctcccttgtgcgtgggtaagccgctgctgggttttcctccgggagaggggacggtcaatcctgtgggtgaagagagagggaaacacagcagcatctctccactgaaagaagtgggacttcccgtcgcctgcgagcctgcggcctgctggagcctgcgcagcttggatggatactccatgagaaaagccgtgggtggaaccaggagcctcctccacaccagcgctgatgcccaataaagatgcccactgaggaatcatgaagcttcctttctggattcatttattatttcaatgtgactttaattttttggatggataagcctgtctatggtacaaaaatcacaaggcattcaagtgtacagtgaaaagtctccctttccagatattcaagtcacctccttaaaggtagtcaagattgtgttttgaggtttccttcagacagattccaggcgatgtgcaagtgtatgcacgtgtgcacacaccacacacatacacacacacaagcttttttacacaaatggtagcatactttatattggtctgtatcttgctttttttcaccaatatttctcagacatcggttcatattaagacataaattactttttcattcttttataccgctgcatagtattccattgtgtgagtgtaccataatgtatttaaccagtcttcttttgatatactattttcatctcttgttattgcatctgctgagttaataaatcaaatatatgtcaaaaaaaaaaaaaaaaaaaaaaaaaaaaaaaaaaaaaaaaat

SEQ ID NO: 340 - DNA, 2059 bp, Homo sapiens
gtggatatccccgagtcaccgcgtccctctcctgcagctcccgcgtcgctgggaggagcgagggagcgagcgggaaggggtctagctggcctttgctcggccctccccagcgcccggctttgaacccgccctgcactgctgtctgggcgggtccggggactcagcactcgacccaaaggtgcaggcgcgcgagcacaacccatggctgcgctgggctgcgcgaggctgaggtgggcgctgcgaggggccggccgtggcctctgcccccacggggccagagccaaggccgcgatccctgccgccctcccctcggacaaggccaccggagctcccggagccgggcctggtgtccggcggcggcaacggagcttagaggagattccacgtctaggacagctgcgcttcttctttcagctgttcgttcaaggctatgccctgcaactgcaccagttacaggtgctttacaaggccaagtacggtccaatgtggatgtcctacttagggcctcagatgcacgtgaacctggccagtgccccgctcttggagcaagtgatgcggcaagagggaaagtacccagtacggaacgacatggagctatggaaggagcaccgggaccagcacgacctgacctatgggccgttcaccacggaaggacaccactggtaccagctgcgccaggctctgaaccagcggttgctgaagccagcggaagcagcgctctatacggatgctttcaatgaggtgattgatgactttatgactcgactggaccagctgcgggcagagagtgcttcggggaaccaggtgtcggacatggctcaactcttctactactttgccttggaagctatttgctacatcctgttcgagaaacgcattggctgcctgcagcgatccatccccgaggacaccgtgaccttcgtcagatccatcgggttaatgttccagaactcactctatgccaccttcctccccaagtggactcgccccgtgctgcctttctggaagcgatacctggatggttggaatgccatcttttcctttgggaagaagctgattgatgagaagctcgaagatatggaggcccaactgcaggcagcagggccagatggcatccaggtgtctggctacctgcacttcttactggccagtggacagctcagtcctcgggaggccatgggcagcctgcctgagctgctcatggctggagtggacacgacatccaacacgctgacatgggccctgtaccacctctcaaaggaccctgagatccaggaggccttgcacgaggaagtggtgggtgtggtgccagccgggcaagtgccccagcacaaggactttgcccacatgccgttgctcaaagctgtgcttaaggagactctgcgtctctaccctgtggtccccacaaactcccggatcatagaaaaggaaattgaagttgatggcttcctcttccccaagaacacccagtttgtgttctgccactatgtggtgtcccgggaccccactgccttctctgagcctgaaagcttccagccccaccgctggctgagaaacagccagcctgctacccccaggatccagcacccatttggctctgtgccctttggctatggggtccgggcctgcctgggccgcaggattgcagagctggagatgcagctactcctcgcaaggctgatccagaagtacaaggtggtcctggccccggagacgggggagttgaagagtgtggcccgcattgtcctggttcccaataagaaagtgggcctgcagttcctgcagagacagtgctgagctgagtctccgccttgctggggcttgtcctagaggctccagctctggcacagtggttcctggctgctgccatgtctcagatgaggagggagagaaggaggccgccagactcgagaggtgggaggaactccttgcacacaccctgagcttttgccacttctatcatttttgagcaactccctctcagctaaaaggccacccctttatcgcattgctgtccttgggtagaatataaaataaagggacttttatttcttattgg

SEQ ID NO: 341 - DNA, 1464 bp, Homo sapiens
ctccccgcgccgccccgcgcaggcgcccccgccccgccgtcgccgccgccgcagccaggagccgctgcaccatgccccgcatagatgcggacctcaagctcgacttcaaggacgtcctgctccgacctaagcggagcagcctcaagagccgagccgaggtggatcttgaacgcaccttcacgtttcgaaattcaaagcagacctactcagggattcccatcatcgtggccaacatggacactgtgggcacgtttgagatggcagccgtgatgtcacagcactccatgtttacagcaattcataagcattactccctggatgactggaagctctttgccacaaatcacccagaatgcctgcagaatgtagccgtgagttcaggcagtgggcagaatgatctggaaaagatgaccagcatcctggaagctgtgccacaggttaagtttatttgcctggatgtggccaatgggtattcagaacattttgtggaattcgtgaaacttgtccgtgccaaatttcctgaacacaccattatggcagggaacgtggtgacaggagaaatggtagaagagcttattctttccggagcagatatcatcaaagtgggagttggaccaggttctgtgtgcaccacccgcaccaagacgggagtggggtacccccagctgagtgccgtcattgagtgtgccgactctgcccacggcctgaagggccacatcatctctgatggaggctgtacgtgtccaggggatgtcgccaaagcctttggaactggagcagattttgtcatgctgggaggaatgttttcgggtcatacggagtgtgctggagaagtgattgagaggaacggacggaagctcaagctcttctacgggatgagctctgacaccgccatgaacaagcacgcaggaggagttgctgagtacagagcctctgagggtaagactgtggaagttccttacaaaggagatgtggaaaacactatcctggatattctcgggggactgaggtccacgtgcacctacgtgggggccgccaaactcaaggagctcagcaggagggcaacattcatccgggtgacccagcagcacaacaccgtgttcagctaaccctggggacaaagcagcgtctggctcgatggaagcgtccaaacctgcttttcccatctccccccaagtctgttccgtcagagcttctggctgctcctgaatggtggaatgcctgtgtcctctcttctgtctcctgccgcctggaggcttcggggctctcccgcctgccttctcggggcccagacgcaaggcaccgattgggccaacatcagagccctgctgcccagaactcataacctcattgttcaaaccaacacttgcacctttctctttttctctttctctctccctttctttgtttttctttcttttttaaaagaagatggtttcagctttaatataatgctattatctt

SEQ ID NO: 342 - DNA, 2728 bp, Homo sapiens
ggggagacgtgagctgagggcgcagaggcaggcaggtgagagcgggagctggagcagcagctggggaggcagcgggaggggccttcccggtccccaggctgcggggcaggccagaggccctgggacacacgggcaggcatctctgagggtccccaaggaacatggctgggagccgtgaggtggtggccatggactgcgagatggtggggctggggccccaccgggagagtggcctggctcgttgcagcctcgtgaacgtccacggtgctgtgctgtacgacaagttcatccggcctgagggagagatcaccgattacagaacccgggtcagcggggtcacccctcagcacatggtgggggccacaccatttgccgtggccaggctagaggtccccttcccatcctctccaacggcagctgtgtgaaagcaagctgactggcctgtgtgaccagagcagggcaggctgtccatgtgggaggcggggcgaggaacgcggggctggggcactcacagctgggcgcctgggctgctggaggcctggagtggtcgttcactcttctggctcagtgtggcagtggcaggcgggctctggattcatcccactggcttcaaggcctggctttgccactaactagccgtgtgactgtcccagttatcaaatggtgcttggcaaatcacaccaaaacttaccggttcaaacaatgtcaatacttatttcgctcggccacctgcagtttgggcaggtgctctgcagcaggacaggccgtcagttaaggcaccttgaaggctgggggctggaaccattggaaggtttgctcacccacctgtctggtggctggtgctggcctgccttggacacatcactatctcggtggcttttccccgtggtctttccagcatggtggctttggggtggccagacatttatttatttatttatttattgagacggagtcgtgctcagtcgcccaagctgtagtgcagtggcacgatctcagctcacttgcaatctccctcccaggctcaagcaattctcctgcctcagcctcccgagtaactgggaatagccacggcgcatgggtaatttttgcatttttagtagagacagagtctcaccatgttggccaggctggtctcaaactcctggcctcaggtgatccacctgcctcacctcccaaagtgctgggattacagacgtgagacaccgtgcctggctggtggccggacttcttatagaattgcggtcccagagagaagtcagaagtcatacagcccagcccatatgcaatgggaggggagtttgattccatcttttttaagaagagtgtcaaggaatttgcaaacttgttttaaaatcatcagagtaagcctgggcatgtcactcctctgcatttcagatatttcctttgtaaaactcagttaaatgcagtgctccctcctcactgttagttttctgtggctgccgtaaggaagccatcaacttagtgattcacagcaacacagatgtcttctcttacagttctgtagtttcgaagttcagcgtgggtctcactggtctaaaatcaaagtgtcagtggggctaggttccttctggatgctctggggaagaatccatttcctcgccctttctggcttctagaggctgcctgaataccttaactcacggcccctccctccatcttcaaagccagcaacagcctgtttgcctcatgtggattcactctgacctccacatgtaaggaggcttgtgattatgttgggaccacatgggtaggccaggtgatctccccatttgaaggtcgactgattagcaatctaagttctgcccggaactttaattcctctttgccaggtaatgcattcacagatcctggggactagggtgtggacatctttgggaggtcattattctgcctgccataatagaattgttgggaagattaaacaacataatatacatgacgtatgttgaggcacgcttggcacctgggaaatactcaggatgtactaaccattgctcctacacagttcagctcctgaaggagtccaggtgggcttttggcacagaatgaaactatcaggtgtgaggagggtcctagtccaatctcttcttttcaaagatgatacatttgaagcccagggaggactgataatttgcccaaggtcatacagccagtcaaggagggattgctcccttgccagccccagccccacccagaagatgctgggtcatgtaggggtgggcacatgtcttcctggccagatcctgcagctcctgaaaggcaagctggtggtgggtcatgacctgaagcacgacttccaggcactgaaagaggacatgagcggctacacaatctacgacacgtccactgacaggctgttgtggcgtgaggccaagctggaccactgcaggcgtgtctccctgcgggtgctgagtgagcgcctcctgcacaagagcatccagaacagcctgcttggacacagctcggtggaagatgcgagggcaacgatggagctctatcaaatctcccagagaatccgagcccgccgagggctgccccgcctggctgtgtcagactgaagccccatccagcccgttccgcagggactagaggctttcggctttttgggacagcaactaccttgcttttggaaaatacatttttaatagtaaagtggctctatattttctctacgcaaaaaaaaaaaaaaaaaaaaaaaaaaaaa

SEQ ID NO: 343 - DNA, 2298 bp, Homo sapiens
tcggccgagcccagagacagccagttcctctcccgccgcgccgggccgcgtgccgctcgctccccggccgtggcgcctccgggccagacgcgctgcagcctccagcccgcggcaagcgggcggggcggccgcgccacccccggccccgcgccagcagcccctcgccgcgcgtccagcgttcccggccagcagcctccccatacgcagtcctgctggaccgccccgtcgcgccccccactctgaactcaagtcaccgtggagctccgccgccccgaaactttcacgcgagcgggaaatatgggatgtataaaatcaaaagggaaagacagcttgagtgacgatggagtagatttgaagactcaaccagtacgtaatactgaaagaactatttatgtgagagatccaacgtccaataaacagcaaaggccagttccagaatctcagcttttacctggacagaggtttcaaactaaagatccagaggaacaaggagacattgtggtagccttgtacccctatgatggcatccacccggacgacttgtctttcaagaaaggagagaagatgaaagtcctggaggagcatggagaatggtggaaagcaaagtcccttttaacaaaaaaagaaggcttcatccccagcaactatgtggccaaactcaacaccttagaaacagaagagtggtttttcaaggatataaccaggaaggacgcagaaaggcagcttttggcaccaggaaatagcgctggagctttccttattagagaaagtgaaacattaaaaggaagcttctctctgtctgtcagagactttgaccctgtgcatggtgatgttattaagcactacaaaattagaagtctggataatgggggctattacatctctccacgaatcacttttccctgtatcagcgacatgattaaacattaccaaaagcaggcagatggcttgtgcagaagattggagaaggcttgtattagtcccaagccacagaagccatgggataaagatgcctgggagatcccccgggagtccatcaagttggtgaaaaggcttggcgctgggcagtttggggaagtctggatgggttactataacaacagtaccaaggtggctgtgaaaaccctgaagccaggaactatgtctgtgcaagccttcctggaagaagccaacctcatgaagaccctgcagcatgacaagctcgtgaggctctacgctgtggtcaccagggaggagcccatttacatcatcaccgagtacatggccaagggcagtttgctggatttcctgaagagcgatgaaggtggcaaagtgctgcttccaaagctcattgacttttctgctcagattgcagagggaatggcatacatcgagcggaagaactacattcaccgggacctgcgagcagctaatgttctggtctccgagtcactaatgtgcaaaattgcagattttggccttgctagagtaattgaagataatgagtacacagcaagggaaggtgctaagttccctattaagtggacggctccagaagcaatcaactttggatgtttcactattaagtctgatgtgtggtcctttggaatcctcctatacgaaattgtcacctatgggaaaattccctacccagggagaactaatgccgacgtgatgaccgccctgtcccagggctacaggatgccccgtgtggagaactgcccagatgagctctatgacattatgaaaatgtgctggaaagaaaaggcagaagagagaccaacgtttgactacttacagagcgtcctggatgatttctacacagccacggaagggcaataccagcagcagccttagagcacagggagacccgtccatttggcaggggtggctgcctcatttagagaggaaaagtaaccatcactggttgcacttatgatttcatgtgcggggatcatctgccgtgcctggatcctgaaatagaggctaaattactcaggaagaacaccctctaaatgggaaagtattctgtactcttagatggattctccactcagttgcaacttggacttgtcctcagcagctggtaatcttgctctgcttgacaacatctgagtgcagccgtttgagaagaaaacatctattctctccaaaaatgcacccaactagctctatgtttacaaatggacataggactcaaagtttcagagaccattgcaatgaatccccaataattgcagaactaaactcatttataaagctaaaataaccggatatatacatagcatgacatttctttgtgctttggcttacttgttt

SEQ ID NO: 344 - DNA, 1646 bp, Homo sapiens
cactgcgaagcccagctgcgcgcgccttgggattgactgtccacgctcgcccggctcgtccgacgcgccctccgccagccgacagacacagccgcacgcactgccgtgttctccctgcggctcggacacatagtatgaccattaggtgtttcgtctcccacccattttctatggaaaaccaaggggatcgggccatgatagccactggcagctttgaagaacgggacacctttagagaagcttgatcttggaggcctcaccgtgagaccttacaaagccggattccggcagagttcctctatctcgtcttgttgctgattaaaggtgcccctgtctccagtttttctccatctcctgggacgtagcaggaaatcagcatcatggttgggttcaaggccacagatgtgccccctactgccactgtgaagtttcttggggctggcacagctgcctgcatcgcagatctcatcacctttcctctggatactgctaaagtccggttacagatccaaggagaaagtcaggggccagtgcgcgctacagccagcgcccagtaccgcggtgtgatgggcaccattctgaccatggtgcgtactgagggcccccgaagcctctacaatgggctggttgccggcctgcagcgccaaatgagctttgcctctgtccgcatcggcctgtatgattctgtcaaacagttctacaccaagggctctgagcatgccagcattgggagccgcctcctagcaggcagcaccacaggtgccctggctgtggctgtggcccagcccacggatgtggtaaaggtccgattccaagctcaggcccgggctggaggtggtcggagataccaaagcaccgtcaatgcctacaagaccattgcccgagaggaagggttccggggcctctggaaagggacctctcccaatgttgctcgtaatgccattgtcaactgtgctgagctggtgacctatgacctcatcaaggatgccctcctgaaagccaacctcatgacagatgacctcccttgccacttcacttctgcctttggggcaggcttctgcaccactgtcatcgcctcccctgtagacgtggtcaagacgagatacatgaactctgccctgggccagtacagtagcgctggccactgtgcccttaccatgctccagaaggaggggccccgagccttctacaaagggttcatgccctcctttctccgcttgggttcctggaacgtggtgatgttcgtcacctatgagcagctgaaacgagccctcatggctgcctgcacttcccgagaggctcccttctgagcctctcctgctgctgacctgatcacctctggctttgtctctagccgggccatgctttccttttcttccttctttctcttccctccttcccttctctccttccctctttccccacctcttccttccgctcctttacctaccaccttccctctttctacattctcatctactcattgtctcagtgctggtggagttgacatttgacagtgtgggaggcctcgtaccagccaggatcccaagcgtcccgtcccttggaaagttcagccagaatcttcgtcctgcccccgacagcccagcctagcccacttgtcatccataaagcaagctcaaccttgg

SEQ ID NO: 345 - DNA, 834 bp, Homo sapiens
cccgtccagagtcctctgtggtccctgctgccaccatggccactcaccgcctcgtgatggtccggcacggcgagacgacatggaaccaggagaaccgtttctgtggctggttcgatgcagagctgagtgaaaaggggaccgaggaggccaagcggggagccaaggccatcaaggatgccaagatggagtttgacatctgctacacgtcagtgctgaagcgggccatccgaaccctctgggccatcctggacggcacggaccagatgtggctgcctgtggtgcgcacttggcgcttcaatgagcggcattacgggggcctcacaggcttcaacaaggcagaaacggccgccaagcacggggaggagcaggtaagatcttggaggcgctccttcgacatcccgccgcccccgatggacgagaagcacccctactacaactccattagcaaggagcgtcggtacgcaggcctgaagcccggggaactccccacctgcgagagcctcaaggacaccattgcccgggccctgcccttctggaacgaggagattgttccccagatcaaggccggcaagcgagtgctcattgcagcccacgggaacagcctgcggggcattgtcaagcacctggaagggatgtcagaccaggcgatcatggagctgaacctgcccacggggatccccattgtgtatgagctgaacaaggagctgaagcccaccaagcccatgcagttcctgggtgatgaggaaacggtgcggaaggccatggaggctgtggctgcccagggcaaggccaagtgaggggtgggctttgggcaataaaggcacctcccccaac

SEQ ID NO: 346 - DNA, 6754 bp, Homo sapiens
gtcgacgtggcggccggcggcggctgcgggctgagcggcgagtttccgatttaaagctgagctgcgaggaaaatggcggcgggaggatcaaaatacttgctggatggtggactcagagaccaataaaaataaactgcttgaacatcctttgactggttagccagttgctgatgtatattcaagatgagtggattaggagaaaacttggatccactggccagtgattcacgaaaacgcaaattgccatgtgatactccaggacaaggtcttacctgcagtggtgaaaaacggagacgggagcaggaaagtaaatatattgaagaattggctgagctgatatctgccaatcttagtgatattgacaatttcaatgtcaaaccagataaatgtgcgattttaaaggaaacagtaagacagatacgtcaaataaaagagcaaggaaaaactatttccaatgatgatgatgttcaaaaagccgatgtatcttctacagggcagggagttattgataaagactccttaggaccgcttttacttcaggcattggatggtttcctatttgtggtgaatcgagacggaaacattgtatttgtatcagaaaatgtcacacaatacctgcaatataagcaagaggacctggttaacacaagtgtttacaatatcttacatgaagaagacagaaaggattttcttaagaatttaccaaaatctacagttaatggagtttcctggacaaatgagacccaaagacaaaaaagccatacatttaattgccgtatgttgatgaaaacaccacatgatattctggaagacataaacgccagtcctgaaatgcgccagagatatgaaacaatgcagtgctttgccctgtctcagccacgagctatgatggaggaaggggaagatttgcaatcttgtatgatctgtgtggcacgccgcattactacaggagaaagaacatttccatcaaaccctgagagctttattaccagacatgatctttcaggaaaggttgtcaatatagatacaaattcactgagatcctccatgaggcctggctttgaagatataatccgaaggtgtattcagagattttttagtctaaatgatgggcagtcatggtcccagaaacgtcactatcaagaagttaccagtgatgggatattttccccaacagcttatcttaatggccatgcagaaaccccagtatatcgattctcgttggctgatggaactatagtgactgcacagacaaaaagcaaactcttccgaaatcctgtaacaaatgatcgacatggctttgtctcaacccacttccttcagagagaacagaatggatatagaccaaacccaaatcctgttggacaagggattagaccacctatggctggatgcaacagttcggtaggcggcatgagtatgtcgccaaaccaaggcttacagatgccgagcagcagggcctatggcttggcagaccctagcaccacagggcagatgagtggagctaggtatgggggttccagtaacatagcttcattgacccctgggccaggcatgcaatcaccatcttcctaccagaacaacaactataggctcaacatgagtagccccccacatgggagtcctggtcttgccccaaaccagcagaatatcatgatttctcctcgtaatcgtgggagtccaaagatagcctcacatcagttttctcctgttgcaggtgtgcactctcccatggcatcttctggcaatactgggaaccacagcttttccagcagctctctcagtgccctgcaagccatcagtgaaggtgtggggacttcccttttatctactctgtcatcaccaggccccaaattggataactctcccaatatgaatattacccaaccaagtaaagtaagcaatcaggattccaagagtcctctgggcttttattgcgaccaaaatccagtggagagttcaatgtgtcagtcaaatagcagagatcacctcagtgacaaagaaagtaaggagagcagtgttgagggggcagagaatcaaaggggtcctttggaaagcaaaggtcataaaaaattactgcagttacttacctgttcttctgatgaccggggtcattcctccttgaccaactcccccctagattcaagttgtaaagaatcttctgttagtgtcaccagcccctctggagtctcctcctctacatctggaggagtatcctctacatccaatatgcatgggtcactgttacaagagaagcaccggattttgcacaagttgctgcagaatgggaattcaccagctgaggtagccaagattactgcagaagccactgggaaagacaccagcagtataacttcttgtggggacggaaatgttgtcaagcaggagcagctaagtcctaagaagaaggagaataatgcacttcttagatacctgctggacagggatgatcctagtgatgcactctctaaagaactacagccccaagtggaaggagtggataataaaatgagtcagtgcaccagctccaccattcctagctcaagtcaagagaaagaccctaaaattaagacagagacaagtgaagagggatctggagacttggataatctagatgctattcttggtgatctgactagttctgacttttacaataattccatatcctcaaatggtagtcatctggggactaagcaacaggtgtttcaaggaactaattctctgggtttgaaaagttcacagtctgtgcagtctattcgtcctccatataaccgagcagtgtctctggatagccctgtttctgttggctcaagtcctccagtaaaaaatatcagtgctttccccatgttaccaaagcaacccatgttgggtgggaatccaagaatgatggatagtcaggaaaattatggctcaagtatgggagactggggcttaccaaactcaaaggccggcagaatggaacctatgaattcaaactccatgggaagaccaggaggagattataatacttctttacccagacctgcactgggtggctctattcccacattgcctcttcggtctaatagcataccaggtgcgagaccagtattgcaacagcagcagcagatgcttcaaatgaggcctggtgaaatccccatgggaatgggggctaatccctatggccaagcagcagcatctaaccaactgggttcctggcccgatggcatgttgtccatggaacaagtttctcatggcactcaaaataggcctcttcttaggaattccctggatgatcttgttgggccaccttccaacctggaaggccagagtgacgaaagagcattattggaccagctgcacactcttctcagcaacacagatgccacaggcctggaagaaattgacagagctttgggcattcctgaacttgtcaatcagggacaggcattagagcccaaacaggatgctttccaaggccaagaagcagcagtaatgatggatcagaaggcaggattatatggacagacatacccagcacaggggcctccaatgcaaggaggctttcatcttcagggacaatcaccatcttttaactctatgatgaatcagatgaaccagcaaggcaattttcctctccaaggaatgcacccacgagccaacatcatgagaccccggacaaacacccccaagcaacttagaatgcagcttcagcagaggctgcagggccagcagtttttgaatcagagccgacaggcacttgaattgaaaatggaaaaccctactgctggtggtgctgcggtgatgaggcctatgatgcagccccagcagggttttcttaatgctcaaatggtcgcccaacgcagcagagagctgctaagtcatcacttccgacaacagagggtggctatgatgatgcagcagcagcaacagcagcagcagcagcagcagcagcagcaacagcaacagcaacagcaacagcagcaacagcagcaaacccaggccttcagcccacctcctaatgtgactgcttcccccagcatggatgggcttttggcaggacccacaatgccacaagctcctccgcaacagtttccatatcaaccaaattatggaatgggacaacaaccagatccagcctttggtcgagtgtctagtcctcccaatgcaatgatgtcgtcaagaatgggtccctcccagaatcccatgatgcaacacccgcaggctgcatccatctatcagtcctcagaaatgaagggctggccatcaggaaatttggccaggaacagctccttttcccagcagcagtttgcccaccaggggaatcctgcagtgtatagtatggtgcacatgaatggcagcagtggtcacatgggacagatgaacatgaaccccatgcccatgtctggcatgcctatgggtcctgatcagaaatactgctgacatctctgcaccaggacctcttaaggaaaccactgtacaaatgacactgcactaggattattgggaaggaatcattgttccaggcatccatcttggaagaaaggaccagctttgagctccatcaagggtattttaagtgatgtcatttgagcaggactggattttaagccgaagggcaatatctacgtgtttttcccccctccttctgctgtgtatcatggtgttcaaaacagaaatgttttttggcattccacctcctagggatataattctggagacatggagtgttactgatcataaaacttttgtgtcacttttttctgccttgctagccaaaatctcttaaatacacgtaggtgggccagagaacattggaagaatcaagagagattagaatatctggtttctctagttgcagtattggacaaagagcatagtcccagccttcaggtgtagtagttctgtgttgaccctttgtccagtggaattggtgattctgaattgtcctttactaatggtgttgagttgctctgtccctattatttgccctaggctttctcctaatgaaggttttcatttgccattcatgtcctgtaatacttcacctccaggaactgtcatggatgtccaaatggctttgcagaaaggaaatgagatgacagtatttaatcgcagcagtagcaaacttttcacatgctaatgtgcagctgagtgcactttatttaaaaagaatggataaatgcaatattcttgaggtcttgagggaatagtgaaacacattcctggtttttgcctacacttacgtgttagacaagaactatgatttttttttttaaagtactggtgtcaccctttgcctatatggtagagcaataatgctttttaaaaataaacttctgaaaacccaaggccaggtactgcattctgaatcagaatctcgcagtgtttctgtgaatagatttttttgtaaatatgacctttaagatattgtattatgtaaaatatgtatatacctttttttgtaggtcacaacaactcatttttacagagtttgtgaagctaaatatttaacattgttgatttcagtaagctgtgtggtgaggctaccagtggaagagacatcccttgacttttgtggcctgggggaggggtagtgcaccacagcttttccttccccaccccccagccttagatgcctcgctcttttcaatctcttaatctaaatgctttttaaagagattatttgtttagatgtaggcattttaattttttaaaaattcctctaccagaactaagcactttgttaatttggggggaaagaatagatatggggaaataaacttaaaaaaaaatcaggaatttaaaaaaaacgagcaatttgaagagaatcttttggattttaagcagtccgaaataatagcaattcatgggctgtgtgtgtgtgtgtatgtgtgtgtgtgtgtgtgtatgtttaattatgttaccttttcatcccctttaggagcgttttcagattttggttcgtaagacctgaatcccatattgagatctcgagtagaatccttggtgtggtttctggtgtctgctcagctgtcccctcattctactaatgtgatgctttcattatgtccctgtggattagaatagtgtcagttatttcttaagtaactcagtacccagaacagccagttttactgtgattcagagccacagtctaactgagcaccttttaaacccctccctcttctgccccctaccacttttctgctgttgcctctctttgacacctgttttagtcagttgggaggaagggaaaaatcaagtttaattccctttatctgggttaattcatttggttcaaatagttgacggaattgggtttctgaatgtctgtgaatttcagaggtctctgctagccttggtatcattttctagcaataactgagagccagttaattttaagaatttcacacatttagccaatctttctagatgtctctgaaggtaagatcatttaatatctttgatatgcttacgagtaagtgaatcctgattatttccagacccaccaccagagtggatcttattttcaaagcagtatagacaattatgagtttgccctctttcccctaccaagttcaaaatatatctaagaaagattgtaaatccgaaaacttccattgtagtggcctgtgcttttcagatagtatactctcctgtttggagacagaggaagaaccaggtcagtctgtctctttttcagctcaattgtatctgacccttctttaagttatgtgtgtggggagaaatagaatggtgctcttatgtcgac

SEQ ID NO: 347 - DNA, 3622 bp, Homo sapiens
accccttccgatatccgcggtggagccgcccttcccaccccgcgtcgctcggcgttagccaaggcccgggcggcgccaccctccgggggcactaggtctggggccgcagtgcccagcacagagcagcgtttatcgggacgaagatgaatggaaagaattggagcaaaaagaggttgattacagcggcctcagggttcaggcaatgcaaataagcagtgaaaaggaagaagacgataatgaaaagagacaagatccaggtgataactgggaagaaggtggaggtggtggtggaggtatggaaaaatcttcaggtccctggaataaaacagctccagtacaagcacctcctgctccagtaattgttacagaaaccccagaaccagcgatgactagtggtgtgtataggcctcctggggccaggttaaccacaacaaggaaaacaccacaaggaccaccagaaatctacagtgatacacagttcccatccctgcagtcaactgccaagcatgtagaaagccggaagtacttaaaatgaatgctacctggaattaaatgactacatatggcacatctacatcttactttagggacatgaattttttaaaataaataaaatgggaagaaatgtaaatgacatcagatggaaatgtgttttttggggtggcttttagaataaatcccagccttttcaccactttgagagcacagctggcttgaatttaaacctccacgtggacttgctcctctgctctgtcttaaaaaatgtgtaagggaccttgggagggcagtgattcaccacactcgagtttctttacctgatctaatcagatccactcccacaaaatcgatgtgaggagaaatcattgactaatgagtagaatttacttgaatgagaaaattgttacccttgtgcataaagagagagatgtattatctattacttgctaaaagtaagagtcttaggaggaatgtcattacacagcttttaacagttttcttcaagtttgtcctgaaatagggtcacagttaatactattcagtagaagataggaccctagagcttcaatacagcgttctgtgttttctgtttgaattgaagccttaaaatggtttgataaggattttctatatgcctccactcctacccctccccaggattcttctaaggggtggctttttttttaaattcaaggacgaatattttcaaaaaccctagtgaagaagaaatatttactgattacatttcttttcccttagggataaagaaatggagaagagctttgaagtagtaagacacaaaaatagaggtagggatgaggtttcaaaaaaccaggcccttaaacttcagctagacaaccaatatgctgtgcttgaaaatcagaaaagcagccactcacaatacaattaaggaatgggctttgctaacccttctgaggtaactagactgcagctaaccaccaccaacagccattcatcatctgatctctgctggatctacagacaccgatgcagaccactcgatttcatgaccggccctattgcactatggaagttaaagtgtcacgactgctctatgcatattggatttaggggaattttcattgttacataaatgtgtgaactagtttcaacagtgttctttcatatttactctgcaaatacaaaaaaccaaaacctgcagccagtggtcatttcaaaatctttttatgttcagatactgagccttcataagggttgactacctcagatttgctgcactcattgtggacttcatgtggatcacaacttctggataagaagattacaactattaagtgtcgatgtgaaccttgcaaccagctctactggattcttatcagaaatcctgcataaaaagtcagccatctgggttctgatctgctgtaaaagatgaagatttaagtgaccttaattaacctgtcctgtgccctacccttaaggaatactctctgtagtaggctgttgttatattagacttcctggaacacaccgctgaaaagaactgatgtgttcagatcatctgtgtagggctgtgatttgtaatttaaactaattgtattctgaggtaaccacaaaataaattcaaccaaactggggtccaccaagtgggggaaggggaagggagagaataatcttgggggttttttttttttggtaatttttttatttggatagtgcttttttgttttgtttttgttctgcattaaggccttttttgctttgacttgaaataagttctttgacagagcatattgcttggttaattaagtaacctaaagtatgcattaggattgtgaaatgtctcgtgagtatgccaatcctgagggtggaaccaaatagcctttgatgaaaagggcagtggattctggaggctctacttcaggtgctgctataatgcctcatctaatcaggactaaattgtgtaggaaactgcagtgggaagaatatgctttctgctcaggctaagagggtcactgatctgtccttagaaattcagagtaacatgagcaaaacctcagctaaaacccatttaagtggcatggattgtgcatgatctttgataagaattcctcatgtacttgtgcctagtttttcaaggtattggctgttctatagatgcagtgattgtcccagctagctctgttaccagccttttggtgtgtctttatgttcatttggagagtcagggcgaaagacaggtgatgtagcacttctgtttttaataattattgcttaaaatacctattaatagttttgggtcatttaaagggacttgaggaagctacccaggattacagaagagtgtccacctaacaagatggtctggcagtttcctagttttgtatctggttcaatagaaatatgtgaaagtggtaatgtcatcatttgatgcagagtccgggtttctctataataaatccctttgccaaatgcatgagttgcagacttgctactggcaagagtgaagcaagtgggtgagtaaaactattttgacgtgggagcgttttcagataggagtttagtcttgacgaaagtgtccgtgcaggaattggactccgaggagggttacagtatctcctgacgggacctgccactcgcatctgggcaatgttgacatttgaggtggcaggcaggatgcctgccttctaatatatttgggtgagtaactgagccagccaagggaaggttgaatgattaaatcagaaatgggattcttggtaaactgaagacttttatttgggaatgaaaaaccttaaaaaaatctcttcatcgttgaactgtgcattttccctgcattttttcccaacaaaattttgttgggggttatgttactgaagaatgaacagatgagtaagtggaggtgttatgtaaaggcatattgtactcgaaatctgaagacctgcagcagatttaaattacaactcttgttataactttttaaaagattgtgaaaatatcaaaatataaatgaatcaagttttaatatactgtatgatgggtggatgaggctgtccattgtaccatttgtttgaattctcaggcatggtttggcagtgcaagaattctgtaacattaacaaattcaataaaaagtaaatatatgg

SEQ ID NO: 348 - DNA, 1252 bp, Homo sapiens
gctaatcccagtcggtgccgcatccccagcccgccgccatggccgcctacaaactggtgctgatccggcacggcgagagcgcatggaacctggagaaccgcttcagcggctggtacgacgccgacctgagcccggcgggccacgaggaggcgaagcgcggcgggcaggcgctacgagatgctggctatgagtttgacatctgcttcacctcagtgcagaagagagcgatccggaccctctggacagtgctagatgccattgatcagatgtggctgccagtggtgaggacttggcgcctcaatgagcggcactatgggggtctaaccggtctcaataaagcagaaactgctgcaaagcatggtgaggcccaggtgaagatctggaggcgctcctatgatgtcccaccacctccgatggagcccgaccatcctttctacagcaacatcagtaaggatcgcaggtatgcagacctcacagaagatcagctaccctcctgtgagagtctgaaggatactattgccagagctctgcccttctggaatgaagaaatagttccccagatcaaggaggggaaaacgtgtactgattgcagcccatggcaacagccctccggggcattgtcaagcatctggagggtctctctgaagaggctatcaatggagctgaaccttgccgactggtattcccattgtctatgaattggacaaagaacttgaaggcctattcaagccccatgcaagttctggggggatgaagaagaccgtgcgcaatgccatggagctgtggctgcccaggcaacgccaagaagttgaagccgcagggggagatacttgtccgccgaggaagaaccctgtcatgtccgggtattgggtccctttgtaccgcttccacctgttgcaattgtcacctgggacgcattgttggtgcacatcatggagatgtgatgcatgcacaaacgggggaccacagggggcacccaatattctaattatagaacgaaagttggtggcagctagagcacagaccggctagaataagcatagagtgagataagacgtagtaaagagagctagctgactagacagagaaaaccgccctccaagaggaagaagtagagagtggtaggaacgtgtataaatatggagacgagcaactacgacagaacgagatcgaagcagcgcatggaagcagggcagatgattgtacttctcactgctattgctgctactttctactccgaccctcatgcaca

SEQ ID NO: 349 - DNA, 836 bp, Homo sapiens
ccggtgagtcgccggcgctgcagagggaggcggcactggtctcgacgtggggcggccagcgatgaagccgcccagttcaatacaaacaagtgagtttgactcatcagatgaagagcctattgaagatgaacagactccaattcatatatcatggctatctttgtcacgagtgaattgttctcagtttctcggtttatgtgctcttccaggttgtaaatttaaagatgttagaagaaatgtccaaaaagatacagaagaactaaagagctgtggtatacaagacatatttgttttctgcaccagaggggaactgtcaaaatatagagtcccaaaccttctggatctctaccagcaatgtggaattatcacccatcatcatccaatcgcagatggagggactcctgacatagccagctgctgtgaaataatggaagagcttacaacctgccttaaaaattaccgaaaaaccttaatacactgctatggaggacttgggagatcttgtcttgtagctgcttgtctcctactatacctgtctgacacaatatcaccagagcaagccatagacagcctgcgagacctaagaggatccggggcaatacagaccatcaagcaatacaattatcttcatgagtttcgggacaaattagctgcacatctatcatcaagagattcacaatcaagatctgtatcaagataaaggaattcaaatagcatatatatgaccatgtctgaaatgtcagttctctagcataatttgtattgaaatgaaaccaccagtgttatcaacttgaatgtaaatgtacatgtgcagatattcctaaagttttattgac

SEQ ID NO: 350 - DNA, 1428 bp, Homo sapiens
ggcacgagggagcccagagccggttcggcgcgtcgactgcccagagtccgcggccggggcgcgggaggagccaagccgccatggcctaccacagcttcctggtggagcccatcagctgccacgcctggaacaaggaccgcacccagattgccatctgccccaacaaccatgaggtgcatatctatgaaaagagcggtgccaaatggaccaaggtgcacgagctcaaggagcacaacgggcaggtgacaggcatcgactgggcccccgagagtaaccgtattgtgacctgcggcacagaccgcaacgcctacgtgtggacgctgaagggccgcacatggaagcccacgctggtcatcctgcggatcaaccgggctgcccgctgcgtgcgctgggcccccaacgagaacaagtttgctgtgggcagcggctctcgtgtgatctccatctgttatttcgagcaggagaatgactggtgggtttgcaagcacatcaagaagcccatccgctccaccgtcctcagcctggactggcaccccaacaatgtgctgctggctgccggctcctgtgacttcaagtgtcggatcttttcagcctacatcaaggaggtggaggaacggccggcacccaccccgtggggctccaagatgccctttggggaactgatgttcgaatccagcagtagctgcggctgggtacatggcgtctgtttctcagccagcgggagccgcgtggcctgggtaagccacgacagcaccgtctgcctggctgatgccgacaagaagatggccgtcgcgactctggcctctgaaacactaccactgctggcgctgaccttcatcacagacaacagcctggtggcagcgggccacgactgcttcccggtgctgttcacctatgacgccgccgcggggatgctgagcttcggcgggcggctggacgttcctaagcagagctcgcagcgtggcttgacggcccgcgagcgcttccagaacctggacaagaaggcgagctccgagggtggcacggctgcgggcgcgggcctagactcgctgcacaagaacagcgtcagccagatctcggtgctcagcggcggcaaggccaagtgctcgcagttctgcaccactggcatggatggcggcatgagtatctgggatgtgaagagcttggagtcagccttgaaggacctcaagatcaaatgacctgtgaggaatatgttgccttcatcctaactgctggggaagcggggagaggggtcagggaggctaatggttgctttgctgaatgtttctggggtaccaatacgagttcccataggggctgctccctcaaaaagggaggggacagatggggagcttttcttacctattcaaggaatacgtgcctttttcttaaatgctttcatttattgaaaaaaaaaaaaaaaaaaaa

SEQ ID NO: 351 - DNA, 3355 bp, Homo sapiens
ggcacgaggggctaagggtgcgcgagtagccgccacccgttcggcgttggctctggcgtcggggtcgttgtgtcgtgacaaccgctgcggtagccgtttccgaggcagcagttgcggccgctttagccctgagcgggatctgcggctgcctgcgagtctctgctgtgccgacccttctcttcgcggaccccacgccaagcagcgaccctgagccgacagccggagcgcccggcaatggcggcctcgacggcctcgcaccggcccatcaaggggatcttgaagaacaagacctctacgacttcctctatggtggcgtcggccgaacagccccgcgggaatgtcgacgaggagctgagcaaaaaatcccagaagtgggatgaaatgaacatcttggcgacgtatcatccagcagacaaagactatggtttaatgaaaatagatgaaccaagcactccttaccatagtatgatgggggatgatgaagatgcctgtagtgacaccgaggccactgaagccatggcgccagacatcttagccaggaaattagctgcagctgaaggcttggagccaaagtatcggattcaggaacaagaaagcagtggagaggaggatagtgacctctcacctgaagaacgagaaaaaaagcgacaatttgaaatgaaaaggaagcttcactacaatgaaggactcaatatcaaactagccagacaattaatttcaaaagacctacatgatgatgatgaagatgaagaaatgttagagactgcagatggagaaagcatgaatacggaagaatcaaatcaaggatctactccaagtgaccaacagcaaaacaaattacgaagttcatagacgagatttgttcaacactgcaattgtttgttagatgtaaaccctgtgactatagtacgttgcttcttgttcttcacaattcatgacttaagtaccaaaatgcataccagttattatatattgccaagaattaaatgataaacttagagactgattagactgaaaatgcctaatcgatatatatattcttgtgcctagtactttaccacaaatacagtgtaatatcatcagtccaaaactgcattacttttgtaaaaacactggttaatttgtataagatattatagagctttttatgctttagaagttaaacaatatctttgggggggaactaatttattttcatcacttgaaatgtggtagctcttacaaagtttattgatttgatttttttaaaaatcaaaagccaattgaacaacaggatatatagactgataaatatttaggctgaatagtattttaacacttgtcttcaacttgatttgtctgtttaattgaaaagaattataagagttactgttgcattttctgacctactatttttaaaattcctgttgagtttctttgtgtttacaaggaaaggactgaactttttctcatcaaaactagcttttttccccacaaataaattatcaggttaaactttcaccaatgtctgctctgttttttgtttttggggggtttttgtttgtttttgttttttaatgtttttggtacactgggcagacttcagagcagttttttaaaaaaataaatattctaatgtagctatctcgccattccctttaaatacctgtcttaacctcctgcttttctttcctactcctttccacacatacgcacacaatcttctaccttttaaaggatcattaagactgtcaccacattaggagctctttctctcactcttctgtcatttgctgctatgttgaaattcttattttgaccatcaatgcctatgaattcttctaatacgtgaagaaaatagtttgagtagcagcagtgctataggtgggaaatacagtttagctgctgaatttctatacctctctgatttacagattgctaattaaatggctattattagtttggattaattagacttaagaaaacaactaactgagggttttttttgtttgttttttgagggttttctttgcatgagagttgtatgtaaccagtgatatgattattcctgaatgtacagacagaagtaagcctggacattgttaaatagtccctgctttaagggactacgataatgtgtactatgacaaacgtgctttattcttctaacgcagtaagaattaggtggaattttttccttcaaccaagtgcaggaaagccctgtgtgtcttggtttagttatggtttcatttctagccatacaattgatgaattgtgtacaacttttgttagtaccaaaataatctgttatatgaacagacttctaaaataacgtctgtatattttatatatagatacatatatgaaagaaggcttttattgaacagcttatcttccacttgcaggtttatggaaacagcagtatttgaaaataaataaaaagtgggagaattccttgctgttagaagaatgtggccattattttgattttttgaatgagatatataatcaaagtactgctgaactgtgagtgcagtattctaaacatttcagctaggaataccactgatttagaaacaaaactgtttgtctctggtttctgaatttaaaatgttgggattacctgtttaaatctgtcttgggggatgtagagattaagtctgtacatgtgcgtgcacatatattcatgcaccctctgattttggttttcttgtttctgagttcttagaaagtacccacatactcttttttttttttttgtagaagtagctgtcatagagtgaagaaaaggataagactttaaacagttgattctttttgtgttttctacaaactattttttgaaatttaaatcacaaactcattttctggtttttagaaagtagatgatgatttcagaggagtaaggcatgccaagcagcatgctcagtggggttttaggctgtcacatgcagctgagaaaaggtatgttcaagtcataagtaggtaattgatagggtatgaactagtcaaaatatgaaccattatgattcaagttagattttcctctggagagacagatctgaatgttcagttctagccaaggtagattttactttcaactttttaatcagtatcactttctgtgcttaactatttggtgttaccttgtctgttttcatttgtctaaaattctgcagagatgactaaaatttgacataatggtgtaaatggattgttaaggtaactttcagttgaagattaaagcaagatgccattttccccatgactttggttttgtttacatttttccctttcagttagtatacactacacgtactgtaataaaatacaataatatgaaaaaaaaaaaaaaaaaaaaaaaaaaaaaaaaaaa

SEQ ID NO: 352 - DNA, 2986 bp, Homo sapiens
gcgccccagtcgacgctgagctcctctgctactcagagttgcaacctcagcctcgctatggctcccagcagcccccggcccgcgctgcccgcactcctggtcctgctcggggctctgttcccaggacctggcaatgcccagacatctgtgtccccctcaaaagtcatcctgccccggggaggctccgtgctggtgacatgcagcacctcctgtgaccagcccaagttgttgggcatagagaccccgttgcctaaaaaggagttgctcctgcctgggaacaaccggaaggtgtatgaactgagcaatgtgcaagaagatagccaaccaatgtgctattcaaactgccctgatgggcagtcaacagctaaaaccttcctcaccgtgtactggactccagaacgggtggaactggcacccctcccctcttggcagccagtgggcaagaaccttaccctacgctgccaggtggagggtggggcaccccgggccaacctcaccgtggtgctgctccgtggggagaaggagctgaaacgggagccagctgtgggggagcccgctgaggtcacgaccacggtgctggtgaggagagatcaccatggagccaatttctcgtgccgcactgaactggacctgcggccccaagggctggagctgtttgagaacacctcggccccctaccagctccagacctttgtcctgccagcgactcccccacaacttgtcagcccccgggtcctagaggtggacacgcaggggaccgtggtctgttccctggacgggctgttcccagtctcggaggcccaggtccacctggcactgggggaccagaggttgaaccccacagtcacctatggcaacgactccttctcggccaaggcctcagtcagtgtgaccgcagaggacgagggcacccagcggctgacgtgtgcagtaatactggggaaccagagccaggagacactgcagacagtgaccatctacagctttccggcgcccaacgtgattctgacgaagccagaggtctcagaagggaccgaggtgacagtgaagtgtgaggcccaccctagagccaaggtgacgctgaatggggttccagcccagccactgggcccgagggcccagctcctgctgaaggccaccccagaggacaacgggcgcagcttctcctgctctgcaaccctggaggtggccggccagcttatacacaagaaccagacccgggagcttcgtgtcctgtatggcccccgactggacgagagggattgtccgggaaactggacgtggccagaaaattcccagcagactccaatgtgccaggcttgggggaacccattgcccgagctcaagtgtctaaaggatggcactttcccactgcccatcggggaatcagtgactgtcactcgagatcttgagggcacctacctctgtcgggccaggagcactcaaggggaggtcacccgcgaggtgaccgtgaatgtgctctccccccggtatgagattgtcatcatcactgtggtagcagccgcagtcataatgggcactgcaggcctcagcacgtacctctataaccgccagcggaagatcaagaaatacagactacaacaggcccaaaaagggacccccatgaaaccgaacacacaagccacgcctccctgaacctatcccgggacagggcctcttcctcggccttcccatattggtggcagtggtgccacactgaacagagtggaagacatatgccatgcagctacacctaccggccctgggacgccggaggacagggcattgtcctcagtcagatacaacagcatttggggccatggtacctgcacacctaaaacactaggccacgcatctgatctgtagtcacatgactaagccaagaggaaggagcaagactcaagacatgattgatggatgttaaagtctagcctgatgagaggggaagtggtgggggagacatagccccaccatgaggacatacaactgggaaatactgaaacttgctgcctattgggtatgctgaggcccacagacttacagaagaagtggccctccatagacatgtgtagcatcaaaacacaaaggcccacacttcctgacggatgccagcttgggcactgctgtctactgaccccaacccttgatgatatgtatttattcatttgttattttaccagctatttattgagtgtcttttatgtaggctaaatgaacataggtctctggcctcacggagctcccagtccatgtcacattcaaggtcaccaggtacagttgtacaggttgtacactgcaggagagtgcctggcaaaaagatcaaatggggctgggacttctcattggccaacctgcctttccccagaaggagtgatttttctatcggcacaaaagcactatatggactggtaatggttcacaggttcagagattacccagtgaggccttattcctcccttccccccaaaactgacacctttgttagccacctccccacccacatacatttctgccagtgttcacaatgacactcagcggtcatgtctggacatgagtgcccagggaatatgcccaagctatgccttgtcctcttgtcctgtttgcatttcactgggagcttgcactattgcagctccagtttcctgcagtgatcagggtcctgcaagcagtggggaagggggccaaggtattggaggactccctcccagctttggaagggtcatccgcgtgtgtgtgtgtgtgtatgtgtagacaagctctcgctctgtcacccaggctggagtgcagtggtgcaatcatggttcactgcagtcttgaccttttgggctcaagtgatcctcccacctcagcctcctgagtagctgggaccataggctcacaacaccacacctggcaaatttgattttttttttttttttcagagacggggtctcgcaacattgcccagacttcctttgtgttagttaataaagctttctcaactgcc

SEQ ID NO: 353 - DNA, 4065 bp, Homo sapiens
atgtcgactggggacagttttgagactcgatttgaaaaaatggacaacctgctgcgggatcccaaatcggaagtgaattcggattgtttgctggatggattggatgctttggtatatgatttggattttcctgccttaagaaaaaacaaaaatattgacaactttttaagcagatataaagacacaataaataaaatcagagatttacgaatgaaagctgaagattatgaagtagtgaaggtgattggtagaggtgcatttggagaagttcaattggtaaggcataaatccaccaggaaggtatatgctatgaagcttctcagcaaatttgaaatgataaagagatctgattctgcttttttctgggaagaaagggacatcatggcttttgccaacagtccttgggttgttcagcttttttatgcattccaagatgatcgttatctctacatggtgatggaatacatgcctggtggagatcttgtaaacttaatgagcaactatgatgtgcctgaaaaatgggcacgattctatactgcagaagtagttcttgcattggatgcaatccattccatgggttttattcacagagatgtgaagcctgataacatgctgctggataaatctggacatttgaagttagcagattttggtacttgtatgaagatgaataaggaaggcatggtacgatgtgatacagcggttggaacacctgattatatttcccctgaagtattaaaatcccaaggtggtgatggttattatggaagagaatgtgactggtggtcggttggggtatttttatacgaaatgcttgtaggtgatacacctttttatgcagattctttggttggaacttacagtaaaattatgaaccataaaaattcacttacctttcctgatgataatgacatatcaaaagaagcaaaaaaccttatttgtgccttccttactgacagggaagtgaggttagggcgaaatggtgtagaagaaatcaaacgacatctcttcttcaaaaatgaccagtgggcttgggaaacgctccgagacactgtagcaccagttgtacccgatttaagtagtgacattgatactagtaattttgatgacttggaagaagataaaggagaggaagaaacattccctattcctaaagctttcgttggcaatcaactaccttttgtaggatttacatattatagcaatcgtagatacttatcttcagcaaatcctaatgataacagaactagctccaatgcagataaaagcttgcaggaaagtttgcaaaaaacaatctataagctggaagaacagctgcataatgaaatgcagttaaaagatgaaatggagcagaagtgcagaacctcaaacataaaactagacaagataatgaaagaattggatgaagagggaaatcaaagaagaaatctagaatctacagtgtctcagattgagaaggagaaaatgttgctacagcatagaattaatgagtaccaaagaaaagctgaacaggaaaatgagaagagaagaaatgtagaaaatgaagtttctacattaaaggatcagttggaagacttaaagaaagtcagtcagaattcacagcttgctaatgagaagctgtcccagttacaaaagcagctagaagaagccaatgacttacttaggacagaatcggacacagctgtaagattgaggaagagtcacacagagatgagcaagtcaattagtcagttagagtccctgaacagagagttgcaagagagaaatcgaattttagagaattctaagtcacaaacagacaaagattattaccagctgcaagctatattagaagctgaacgaagagacagaggtcatgattctgagatgattggagaccttcaagctcgaattacatctttacaagaggaggtgaagcatctcaaacataatctcgaaaaagtggaaggagaaagaaaagaggctcaagacatgcttaatcactcagaaaaggaaaagaataatttagagatagatttaaactacaaacttaaatcattacaacaacggttagaacaagaggtaaatgaacacaaagtaaccaaagctcgtttaactgacaaacatcaatctattgaagaggcaaagtctgtggcaatgtgtgagatggaaaaaaagctgaaagaagaaagagaagctcgagagaaggctgaaaatcgggttgttcagattgagaaacagtgttccatgctagacgttgatctgaagcaatctcagcagaaactagaacatttgactggaaataaagaaaggatggaggatgaagttaagaatctaaccctgcaactggagcaggaatcaaataagcggctgttgttacaaaatgaattgaagactcaagcatttgaggcagacaatttaaaaggtttagaaaagcagatgaaacaggaaataaatactttattggaagcaaagagattattagaatttgagttagctcagcttacgaaacagtatagaggaaatgaaggacagatgcgggagctacaagatcagcttgaagctgagcaatatttctcgacactttataaaacccaggtaaaggaacttaaagaagaaattgaagaaaaaaacagagaaaatttaaagaaaatacaggaactacaaaatgaaaaagaaactcttgctactcagttggatctagcagaaacaaaagctgagtctgagcagttggcgcgaggccttctggaagaacagtattttgaattgacgcaagaaagcaagaaagctgcttcaagaaatagacaagagattacagataaagatcacactgttagtcggcttgaagaagcaaacagcatgctaaccaaagatattgaaatattaagaagagagaatgaagagctaacagagaaaatgaagaaggcagaggaagaatataaactggagaaggaggaggagatcagtaatcttaaggctgcctttgaaaagaatatcaacactgaacgaacccttaaaacacaggctgttaacaaattggcagaaataatgaatcgaaaagattttaaaattgatagaaagaaagctaatacacaagatttgagaaagaaagaaaaggaaaatcgaaagctgcaactggaactcaaccaagaaagagagaaattcaaccagatggtagtgaaacatcagaaggaactgaatgacatgcaagcgcaattggtagaagaatgtgcacataggaatgagcttcagatgcagttggccagcaaagagagtgatattgagcaattgcgtgctaaacttttggacctctcggattctacaagtgttgctagttttcctagtgctgatgaaactgatggtaacctcccagagtcaagaattgaaggttggctttcagtaccaaatagaggaaatatcaaacgatatggctggaagaaacagtatgttgtggtaagcagcaaaaaaattttgttctataatgacgaacaagataaggagcaatccaatccatctatggtattggacatagataaactgtttcacgttagacctgtaacccaaggagatgtgtatagagctgaaactgaagaaattcctaaaatattccagatactatatgcaaatgaaggtgaatgtagaaaagatgtagagatggaaccagtacaacaagctgaaaaaactaatttccaaaatcacaaaggccatgagtttattcctacactctaccactttcctgccaattgtgatgcctgtgccaaacctctctggcatgtttttaagccaccccctgccctagagtgtcgaagatgccatgttaagtgccacagagatcacttagataagaaagaggacttaatttgtccatgtaaagtaagttatgatgtaacatcagcaagagatatgctgctgttagcatgttctcaggatgaacaaaaaaaatgggtaactcatttagtaaagaaaatccctaagaatccaccatctggttttgttcgtgcttcccctcgaacgctttctacaagatccactgcaaatcagtctttccggaaagtggtcaaaaatacatctggaaaaactagttaa

SEQ ID NO: 354 - DNA, 3591 bp, Homo sapiens
agccgctcgccgtccttgcaggctctgccgtcggaaagccgctcattctcgcttccccttccctttcccggctcaagtccttcctctctctttcctttctttccgcctatcttttttctgctgccgctccgggtccgggccattttccgggccgggcgcactaaggtgcgcggccccggggcccagtatatgacccgccgtcctgctatccttcgcttcccccgccccatgtggctgcggggccgcggcggcgctgcccactatggcccggaaagtagttagcaggaagcggaaagcgcccgcctcgccgggagctgggagcgacgctcagggcccgcagtttggctgggatcactcgcttcacaaaaggaaaagacttcctcctgtgaagagatccttagtatactacttgaagaaccgggaagtcaggctacagaatgaaaccagctactctcgagtgttgcatggttatgcagcacagcaacttcccagtctcctgaaggagagagagtttcaccttgggacccttaataaagtgtttgcatctcagtggttgaatcataggcaagtggtgtgtggcacaaaatgcaacacgctatttgtcgtagatgtccagacaagccagatcaccaagatccccattctgaaagaccgggagcctggaggtgtgacccagcagggctgtggtatccatgccatcgagctgaatccttctagaacactgctagccactggaggagacaaccccaacagtcttgccatctatcgactacctacgctggatcctgtgtgtgtaggagatgatggacacaaggactggatcttttccatcgcatggatcagcgacactatggcagtgtctggctcacgtgatggttctatgggactctgggaggtgacagatgatgttttgaccaaaagtgatgcgagacacaatgtgtcacgggtccctgtgtatgcacacatcactcacaaggccttaaaggacatccccaaagaagacacaaaccctgacaactgcaaggttcgggctctggccttcaacaacaagaacaaggaactgggagcagtgtctctggatggctactttcatctctggaaggctgaaaatacactatctaagctcctctccaccaaactgccatattgccgtgagaatgtgtgtctggcttatggtagtgaatggtcagtttatgcagtgggctcccaagctcatgtctccttcttggatccacggcagccatcatacaacgtcaagtctgtctgttccagggagcgaggcagtggaatccggtcagtgagtttctacgagcacatcatcactgtgggaacagggcagggctccctgctgttctatgacatccgagctcagagatttctggaagagaggctctcagcttgttatgggtccaagcccagactagcaggggagaatctgaaactaaccactggcaaaggctggctgaatcatgatgaaacctggaggaattacttttcagacattgacttcttccccaatgctgtttacacccactgctacgactcgtctggaacgaaactctttgtggcaggaggtcccctcccttcagggctccatggaaactatgctgggctctggagttaatgacaactccccaaatgcagagatttacactaacttccattctcagtttccttgtttcttttgattttttttttcctaattgtgtgaggctcttgtgttttagtgggaacaccaaagtttgcctatagtttaggcacttaataggaagaagctctgtacagaaatctgaaagttgttttgctttttgttttcccctttggtaatcaaaattttactatcttttattatttctggcttttcaaccaaacattgttgctaatccctatttttctttaagtgacacacattctcctgtctctggcttcttcaggctgaaatgacatagtctttctcacccttacttcactcttgagaggtagggctcctttataattacatggttgctctcagactttctgtgaaagtttgggagctgtgtgtgtctgtgtgtgtgtgagagagagatcttgtctgcgtgtgtgtgtgtgatcttgtgtgcctgtaggtactgtgtgtcactgaaattacctggagtgaggattacttgtaattaaaatatttataaaagaaacaactttattcacagagtccagctttgggactagtctgtatcttgttttttaagtctaacaacactgataataggaagtaaaaacagaaaggaaaagaaattaccactgggaaaatctttttagttagattgtaggcttcctggggcctcccatgccaggactgcaaagtgatccagccctacctgtcttcccacctgtgtgtcccccgtgtgggaagttggtgtcacttccccttcccaccctcacatctgcttagccagtagccacacccctaaaacatcagactcaccatccaggtgcagctccagaggctacaaaaggcttcatgggacttgaatccccatcctagcttctctctccttcccctcaagacctgatctggttttaaggggcctggagctgggagtctcaagtctgctaagattcacatccatagcccccgtggctttgaggagaatcctctctgccattcttccaatctccccagtgggttttgctattattttctaaattgggttaagtctaagaaggtgggggtgagcagggggtttatctgtgtgtagtgagtgcttcatgtgtggaatattcattttcttactgcagtgggacttggggttgaagccacccctcctactctgttggcttagccctgagatggtgacaggctggcctgcagtcagcatcattgtgcatgtgacagcatcaatgtgattagtaatttgtctgttcctcccttgaactgtctgtttagtctgaggtttttaaacttgcaggcagctgactgtgatgtccacttgttccctgatttttacacatcatgtcaaagataacagctgttcccacccaccagttcctctaagcacatactctgcttttctgtcaacatcccattttggggaaaggaaaagtcatatttattcctgcaccccagttttttaacttgttctcccagttgtccccctcttctctgggtgtaagaagggaaattggaaaaaaaattatatatatattctccttttaatggtggggggctactggagaggagagacagcaagtccaccctaacttgttacacagcacataccacaggttctggaattctcatcttcgaacctagagaaataggtgctataaacagggaattaagcaaaatgctggatgctatagatcttttaattgtcttaattttttttctattattaaactacaggctgtagatttcttagttctcacagaacttctatcattttaaactgacttgtatatttaaaaaaaaaatcttcagtaggatgttttgtactattgctagaccctcttctgtaatgggtaatgcgtttgattgtttgagattttctgtttttaaaaatgtagcacttgactttttgccaaggaaaaaaataaaaattattccagtgc

SEQ ID NO: 355 - DNA, 2192 bp, Homo sapiens
cggcgccggggaccgctgccaccccgcctagcgcagcgccccgtccttccgcagcccaaccgcctcttcccgccccgccccatcccgcccacgggctccagtgggcgggaccagaggagtcccgcgttcggggagtatgtcaaggccgtgacccgtgtattattgtccgagtggccggaacgggagccaacatggcagcggggttcgggcgatgctgcagggtcctgagaagtatttctcgttttcattggagatcacagcatacaaaagccaatcgacaacgtgaaccaggattaggatttagttttgagttcaccgaacagcagaaagaatttcaagctactgctcgtaaatttgccagagaggaaatcatcccagtggctgcagaatatgataaaactggtgaatatccagtccccctaattagaagagcctgggaacttggtttaatgaacacacacattccagagaactgtggaggtcttggacttggaacttttgatgcttgtttaattagtgaagaattggcttatggatgtacaggggttcagactgctattgaaggaaattctttggggcaaatgcctattattattgctggaaatgatcaacaaaagaagaagtatttggggagaatgactgaggagccattgatgtgtgcttattgtgtaacagaacctggagcaggctctgatgtagctggtataaagaccaaagcagaaaagaaaggagatgagtatattattaatggtcagaagatgtggataaccaacggaggaaaagctaattggtattttttattggcacgttctgatccagatcctaaagctcctgctaataaagcctttactggattcattgtggaagcagataccccaggaattcagattgggagaaaggaattaaacatgggccagcgatgttcagatactagaggaattgtcttcgaagatgtgaaagtgcctaaagaaaatgttttaattggtgacggagctggtttcaaagttgcaatgggagcttttgataaaaccagacctgtagtagctgctggtgctgttggattagcacaaagagctttggatgaagctaccaagtatgccctggaaaggaaaactttcggaaagctacttgtagagcaccaagcaatatcatttatgctggctgaaatggcaatgaaagttgaactagctagaatgagttaccagagagcagcttgggaggttgattctggtcgtcgaaatacctattatgcttctattgcaaaggcatttgctggagatattgcaaatcagttagctactgatgctgtgcagatacttggaggcaatggatttaatacagaatatcctgtagaaaaactaatgagggatgccaaaatctatcagatttatgaaggtacttcacaaattcaaagacttattgtagcccgtgaacacattgacaagtacaaaaattaaaaaaattactgtagaaatattgaataactagaacacaagccactgtttcagctccagaaaaaagaaagggctttaacgttttttccagtgaaaacaaatcctcttatattaaatctaagcaactgcttattatagtagtttatacttttgcttaactctgttatgtctcttaagcaggtttggtttttattaaaatgatgtgttttctttagtaccactttacttgaattacattaacctagaaaactacataggttattttgatctcttaagattaatgtagcagaaatttcttggaattttatttttgtaatgacagaaaagtgggcttagaaagtattcaagatgttacaaaatttacatttagaaaatattgtagtatttgaatactgtcaacttgacagtaactttgtagacttaatggtattattaaagttctttttattgcagtttggaaagcatttgtgaaactttctgtttggcacagaaacagtcaaaattttgacattcatattctcctattttacagctacaagaactttcttgaaaatcttatttaattctgagcccatatttcacttaccttatttaaaataaatcaataaagcttgccttaaattatttttatatgactgttggtctctaggtagcctttggtctattgtacacaatctcatttcatatgtttgcattttggcaaagaacttaataaaattgttcagtgcttattatcat

SEQ ID NO: 356 - DNA, 2304 bp, Homo sapiens
cacagctctgcagctcgtggcagcggcgcagcgctccagccatgtcgcgcggcctccagcttctgctcctgagctgcgcctacagcctggctcccgcgacgccggaggtgaaggtggcttgctccgaagatgtggacttgccctgcaccgccccctgggatccgcaggttccctacacggtctcctgggtcaagttattggagggtggtgaagagaggatggagacaccccaggaagaccacctcaggggacagcactatcatcagaaggggcaaaatggttctttcgacgcccccaatgaaaggccctattccctgaagatccgaaacactaccagctgcaactcggggacatacaggtgcactctgcaggacccggatgggcagagaaacctaagtggcaaggtgatcttgagagtgacaggatgccctgcacagcgtaaagaagagacttttaagaaatacagagcggagattgtcctgctgctggctctggttattttctacttaacactcatcattttcacttgtaagtttgcacggctacagagtatcttcccagatttttctaaagctggcatggaacgagcttttctcccagttacctccccaaataagcatttagggctagtgactcctcacaagacagaactggtatgagcaggatttctgcaggttcttcttcctgaagctgaggctcaggggtgtgcctgtctgttacactggaggagagaagaatgagcctacgctgaagatggcatcctgtgaagtccttcacctcactgaaaacatctggaaggggatcccaccccattttctgtgggcaggcctcgaaaaccatcacatgaccacatagcatgaggccactgctgcttctccatggccaccttttcagcgatgtatgcagctatctggtcaacctcctggacattttttcagtcatataaaagctatggtgagatgcagctggaaaagggtcttgggaaatatgaatgcccccagctggcccgtgacagactcctgaggacagctgtcctcttctgcatcttggggacatctctttgaattttctgtgttttgctgtaccagcccagatgttttacgtctgggagaaattgacagatcaagctgtgagacagtgggaaatatttagcaaataatttcctggtgtgaaggtcctgctattactaaggagtaatctgtgtacaaagaaataacaagtcgatgaactattccccagcagggtcttttcatctgggaaagacatccataaagaagcaataaagaagagtgccacatttatttttatatctatatgtacttgtcaaagaaggtttgtgtttttctgcttttgaaatctgtatctgtagtgagatagcattgtgaactgacaggcagcctggacatagagagggagaagaagtcagagagggtgacaagatagagagctatttaatggccggctggaaatgctgggctgacggtgcagtctgggtgctcgcccacttgtcccactatctgggtgcatgatcttgagcaagttccttctggtgtctgctttctccattgtaaaccacaaggctgttgcatgggctaatgaagatcatatacgtgaaaattatttgaaaacatataaagcactatacagattcgaaactccattgagtcattatccttgctatgatgatggtgttttggggatgagagggtgctatccatttctcatgttttccattgtttgaaacaaagaaggttaccaagaagcctttcctgtagccttctgtaggaattcttttggggaagtgaggaagccaggtccacggtctgttcttgaagcagtagcctaacacactccaagatatggacacacgggagccgctggcagaagggacttcacgaagtgttgcatggatgttttagccattgttggctttcccttatcaaacttgggcccttcccttcttggtttccaaaggcatttattgctgagttatatgttcactgtccccctaatattagggagtaaaacggataccaagttgatttagtgtttttacctctgtcttggctttcatgttattaaacgtatgcatgtgaagaagggtgtttttctgttttatattcaactcataagactttgggataggaaaaatgagtaatggttactaggcttaatacctgggtgattacataatctgtacaacgaacccccatgatgtaagtttacctatgtaacaaacctgcacttatacccatgaacttaaaatgaaagttaaaaataaaaaacatatacaaataaaaaaaa

SEQ ID NO: 357 - DNA, 3166 bp, Homo sapiens
ggcgcggcaggaggacgaggcagggcgggcgggcgctctaagggttctgctctgactccaggttgggacagcgtcttcgctgctgctggatagtcgtgttttcggggatcgaggatactcaccagaaaccgaaaatgccgaaaccaatcaatgtccgagttaccaccatggatgcagagctggagtttgcaatccagccaaatacaactggaaaacagctttttgatcaggtggtaaagactatcggcctccgggaagtgtggtactttggcctccactatgtggataataaaggatttcctacctggctgaagctggataagaaggtgtctgcccaggaggtcaggaaggagaatcccctccagttcaagttccgggccaagttctaccctgaagatgtggctgaggagctcatccaggacatcacccagaaacttttcttcctccaagtgaaggaaggaatccttagcgatgagatctactgcccccctgagactgccgtgctcttggggtcctacgctgtgcaggccaagtttggggactacaacaaagaagtgcacaagtctgggtacctcagctctgagcggctgatccctcaaagagtgatggaccagcacaaacttaccagggaccagtgggaggaccggatccaggtgtggcatgcggaacaccgtgggatgctcaaagataatgctatgttggaatacctgaagattgctcaggacctggaaatgtatggaatcaactatttcgagataaaaaacaagaaaggaacagacctttggcttggagttgatgcccttggactgaatatttatgagaaagatgataagttaaccccaaagattggctttccttggagtgaaatcaggaacatctctttcaatgacaaaaagtttgtcattaaacccatcgacaagaaggcacctgactttgtgttttatgccccacgtctgagaatcaacaagcggatcctgcagctctgcatgggcaaccatgagttgtatatgcgccgcaggaagcctgacaccatcgaggtgcagcagatgaaggcccaggcccgggaggagaagcatcagaagcagctggagcggcaacagctggaaacagagaagaaaaggagagaaaccgtggagagagagaaagagcagatgatgcgcgagaaggaggagttgatgctgcggctgcaggactatgaggagaagacaaagaaggcagagagagagctctcggagcagattcagagggccctgcagctggaggaggagaggaagcgggcacaggaggaggccgagcgcctagaggctgaccgtatggctgcactgcgggctaaggaggagctggagagacaggcggtggatcagataaagagccaggagcagctggctgcggagcttgcagaatacactgccaagattgccctcctggaagaggcgcggaggcgcaaggaggatgaagttgaagagtggcagcacagggccaaagaagcccaggatgacctggtgaagaccaaggaggagctgcacctggtgatgacagcacccccgcccccaccaccccccgtgtacgagccggtgagctaccatgtccaggagagcttgcaggatgagggcgcagagcccacgggctacagcgcggagctgtctagtgagggcatccgggatgaccgcaatgaggagaagcgcatcactgaggcagagaagaacgagcgtgtgcagcggcagctgctgacgctgagcagcgagctgtcccaggcccgagatgagaataagaggacccacaatgacatcatccacaacgagaacatgaggcaaggccgggacaagtacaagacgctgcggcagatccggcagggcaacaccaagcagcgcatcgacgagttcgaggccctgtaacagccaggccaggaccaagggcagaggggtgctcatagcgggcgctgccagccccgccacgcttgtgtctttagtgctccaagtctaggaactccctcagatcccagttcctttagaaagcagttacccaacagaaacattctgggctgggaaccagggaggcgccctggtttgttttccccagttgtaatagtgccaagcaggcctgattctcgcgattattctcgaatcacctcctgtgttgtgctgggagcaggactgattgaattacggaaaatgcctgtaaagtctgagtaagaaacttcatgctggcctgtgtgatacaagagtcagcatcattaaaggaaacgtggcaggacttccatctgtgccatacttgttctgtattcgaaatgagctcaaattgattttttaatttctatgaaggatccatctttgtatatttacatgcttagaggggtgaaaattattttggaaattgagtctgaagcactctcgcacacacagtgattccctcctcccgtcactccacgcagctggcagagagcacagtgatcaccagcgtgagtggtggaggaggacacttggatttttttttttgttttttttttttttgcttaacagttttagaatacattgtacttatacaccttattaatgatcagctatatactatttatatacaagtgataatacagatttgtaacattagttttaaaaagggaaagttttgttctgtatattttgttaccttttacagaataaaagaattacatatgaaaaaccctctaaaccatggcacttgatgtgatgtggcaggagggcagtggtggagctggacctgcctgctgcagtcacgtgtaaacaggattattattagtgttttatgcatgtaatggactatgcacacttttaattttgtcagattcacacatgccactatgagctttcagactccagctgtgaagagactctgtttgcttgtgtttgtttgtttgcagtctctctctgccatggccttggcaggctgctggaaggcagcttgtggaggccgttggttccgcccactcattccttctcgtgcactgctttctccttcacagctaagatgccatgtgcaggtggattccatgccgcagacatgaaataaaagctttgcaaaggcacgaaaaaaaaaaaaaaaaaaaaaaaaaaaaaaaaaaaaaaaaaaaaaaaaaaaaaaaaaaaaaaaaaaaaaaaaaaaaaaaaaaaaaaaaaaaaaaaaaaaaaaa

SEQ ID NO: 358 - DNA, 996 bp, Homo sapiens
agcagaggactttttagctgctcactggccccgcttgtctgaccgactcatccgcccgcgacccctaatcccctctgcctgccccaagatgctgaagccagccctggagccccgagggggcttctccttcgagaactgccaaagaaatgcatcattggaacgcgtcctcccggggctcaaggtccctcacgcacgcaagaccgggaccaccatcgcgggcctggtgttccaagacggggtcattctgggcgccgatacgcgagccactaacgattcggtcgtggcggacaagagctgcgagaagatccacttcatcgcccccaaaatctactgctgtggggctggagtagccgcggacgccgagatgaccacacggatggtggcgtccaagatggagctacacgcgttatctacgggccgcgagccccgcgtggccacggtcactcgcatcctgcgccagacgctcttcaggtaccagggccacgtgggtgcatcgctgatcgtgggcggcgtagacctgactggaccgcagctctacggcgtgcatccccatggctcctacagccgtctgcccttcacagccctgggctctggtcaggacgcggccctggcggtgctagaagaccggttccagccgaacatgacgctggaggctgctcaggggctgctggtggaagccgtcaccgccgggatcttgggtgacctgggctccgggggcaatgtggacgcatgtgtgatcacaaagactggcgccaagctgctgcggacactgagctcacccacagagcccgtgaagaggtctggccgctaccactttgtgcctggaaccacagctgtcctgacccagacagtgaagccactaaccctggagctagtggaggaaactgtgcaggctatggaggtggagtaagctgaggcttagagcttggaacaagggggaataaacccagaaaatacagttaaaaaaaaaaaaaacaaaaaaaaaaaaaaaaaaaa

SEQ ID NO: 359 - DNA, 1666 bp, Homo sapiens
acgcgtccgaaagcggccatgttttacatatttcttgattttgtttgttttctcgtgagcttaggccgctggttttggtgatttttgtctgattgcaatgtctggacgtggtaagcaaggaggcaaagctcgcgccaaagcgaaatcccgctcttctcgcgctggtctccagttcccggtgggccgagtgcaccgcctgctccgtaaaggcaactacgcagagcgggttggggcaggcgcgccggtgtacctggcggcggtgttagagtacctgaccgccgagatcctggagctggccggcaacgcggctcgcgacaacaagaagactcgcatcatcccgcgccacttgcagctggccatccgcaacgacgaggagctcaacaaactgctaggccgggtgaccattgctcagggcggcgtccttcctaacatccaggccgtgcttctgcctaagaagaccgagagtcaccacaaggccaagggcaagtgatttgacaggtatctgagctcccggaaacgctatcaaacccaaaggctcttttcagagcccccctaccgtttcaaaggaagagctaacctcactgcttgtaggtagaaggaaaaaagcactaaggttgcaaaagcttctcatttcagagagatgccaggatcctaagtgcctgccaaacttaccaattctaaggaataagtggatggatggcattactgattcctacattactgattgattctgcatccacaaattgttttattaaaaacattctacatcatgtgtggggagataaggaggataaaatgaagagaaagaatattattgaggggaagttcttctgaatacaaaatgtgtttaattttttaaataagtattacattcacagggttcaaactatttgaagtaaagagattatataaagaatccatccctcaacttacccaggtggtcacttttctttttcttgtgtatctgcccagtattcattcctgctgatatcagtcaataatgaatgatacgtgttttcttcacttttttcattcttgtcaggtagcagactgtgtagacttttctgcacttgcccttttcataacaatctatcttggagaactttccctatgagaacatacagagcttcctgtacacagttgcatgtactgcattatgcaaatgcattatattttatgtaacctgtccactgttggtaggcacttgagttgttttagtcttttgctatcaaacagttctgggatgattaaccctgatttactgcaaaattgaaattgctctgctattctgctggaatggtggtaagtgaactgaaaattccagtcactcttgggctagactcaacgttcttaaaaactatgtggccatcaccaaattagttattttgaaccttaatttcttcacctctaaaatggaggtaatacttaccttaagtggctatgagaatgaagatcatgtgtatgaattgttggtgctctaaagaacagcacaaataaaattattttcaaatttaattttaattgaactatgtgtaatttcttaattttgaaataattttatttgtaatgtgcataatcttatttaatgtataatgtatacattgtaatagaaacagatttcccaaattccagcctggcatgaggtaataaaaggtaatgcaaaaaa

SEQ ID NO: 360 - DNA, 1295 bp, Homo sapiens
ctccacttctccccgcccaccctgccggaggctgctcctgattggcttcccggccgcggggctcaggttacattcgcgagcggagccgagcgcgggagaccggacccgagagcagagctgctgtttcggcgcgggtcggctggcggccgatgccccagagcccccacccggcaccacacagaccccatccccgccctgcgccaccttcgtccccgcagaggacccccgacaccagcatggactgctgcaccgagaacgcctgctccaagccggacgacgacattctagacatcccgctggacgatcccggcgccaacgcggccgccgccaaaatccaggcgagttttcggggccacatggcgcggaagaagataaagagcggagagcgcggccggaagggcccgggccctggggggcctggcggagctggggtggcccggggaggcgcgggcggcggccccagcggagactaggccagaactgagcattttcaaagttcccgaggagagatggatgccgcgtccccttcgcagcgacgagacttccctgccgtgtttgtgaccccctcctgcccagcaacctgccagctacaggagccccctgcgtcccagagactccctcacccaggcaggctccgtcgcggagtcgctgagtccgtgcccttttagttagttctgcagtctagtatggtccccatttgcccttccactccaccccaccctaaaccatgcgctcccaatcttccttcttttgcttctcgcccacctcttcccgcacccagcatgcagctctgcctccgcagcctcagtgcgctttcctgcgcgcactgcggagggcgccctaagcgtcacccaagcacactcacttaaagaaaaaacgagttctttcgttctgtgcgcagtaaaaggggcgccctacatctccgtgccactcccgccccagcctagccccaagactttggatccggggcgagatgaagggaagagggttgttttggtttcggacgacccttgctctgaccggaagagaagtccctatcccacacctgcctgtcacgttccctcccctttccccagcgcactgttgagggcagcctctccagctctcttgtttatgcaaacgccgagcgcctgggaggctcggtaggaggagtcttccacggccccgccccgccctgtcggtcccgccctccccccccgccgggctcctggggctgtggccgaaaggtttctgatctccgtgtgtgcatgtgactgtgctgggttggaatgtgaacaataaagaggaatgtccaa

SEQ ID NO: 361 - DNA, 1133 bp, Homo sapiens
agtgtaatgttgggtgggagtgcgggacgcctcaaaatgtcttccagtggcaccctcagcaactactacgtggactcgcttataggccatgagggcgacgaggtgttcgcggcgcgcttcgggccgccggggccaggcgcgcagggccggcctgcaggtgtggctgatggcccggccgccaccgccgccgagttcgcctcgtgtagttttgcccccagatcggccgtgttctctgcctcgtggtccgcggtgccctcccagcccccggcagcggcggcgatgagcggcctctaccacccgtacgttcccccgccgcccctggccgcctctgcctccgagcccggccgctacgtgcgctcctggatggagccgctgcccggcttcccgggcggtgcgggcggtggcggtggtggtggaggcggcggtccgggccgcggtcccagccctggccccagcggcccagccaacgggcgccactacgggattaagcctgaaacccgagcggccccggcccccgccacggccgcctccaccacctcctcctcctccacttccttatcctcctcctccaaacggactgagtgctccgtggcccgggagtcccaggggagcagcggccccgagttctcgtgcaactcgttcctgcaggagaaggcggcaggcggcgacggggggaacgggcctggggcagggatcggggccgcgactgggacgggcggctcgtcggagccctcagcttgcagcgaccacccgatcccaggctgttcgctgaaggaggaggagaagcagcattcgcagccgcagcagcagcaacttgacccaaacaaccccgaagcgaactggatccacgctcgctccacccggaaaaagcgctgtccctacaccaaataccagacgcttgagctggagaaagaattcctcttcaacatgtacctcacccgggaccggcgctacgaggtggccaggattctcaacctaacagagagacaggtcaaaatctggtttcagaaccgtaggatgaaaatgaaaaagatgagcaaggagaaatgccccaaaggagactgacccggcgcggtgctggcgggagcgctcaagggcagcggatttgttgttgttgctgtttcctttgtggg

SEQ ID NO: 362 - DNA, 1386 bp, Homo sapiens
gccccatctccttgggctgcccgtgcttcgtgctttggactaccgcccagcagtgtcctgccctctgcctgggcctcggtccctcctgcacctgctgcctggatccccggcctgcctgggcctgggccttggttctccccatgacaccacctgaacgtctcttcctcccaagggtgtgtggcaccaccctacacctcctccttctggggctgctgctggttctgctgcctggggcccaggggctccctggtgttggcctcacaccttcagctgcccagactgcccgtcagcaccccaagatgcatcttgcccacagcaccctcaaacctgctgctcacctcattggagaccccagcaagcagaactcactgctctggagagcaaacacggaccgtgccttcctccaggatggtttctccttgagcaacaattctctcctggtccccaccagtggcatctacttcgtctactcccaggtggtcttctctgggaaagcctactctcccaaggccacctcctccccactctacctggcccatgaggtccagctcttctcctcccagtaccccttccatgtgcctctcctcagctcccagaagatggtgtatccagggctgcaggaaccctggctgcactcgatgtaccacggggctgcgttccagctcacccagggagaccagctatccacccacacagatggcatcccccacctagtcctcagccctagtactgtcttctttggagccttcgctctgtagaacttggaaaaatccagaaagaaaaaataattgatttcaagaccttctccccattctgcctccattctgaccatttcaggggtcgtcaccacctctcctttggccattccaacagctcaagtcttccctgatcaagtcaccggagctttcaaagaaggaattctaggcatcccaggggaccacacctccctgaaccatccctgatgtctgtctggctgaggatttcaagcctgcctaggaattcccagcccaaagctgttggtctgtcccaccagctaggtggggcctagatccacacacagaggaagagcaggcacatggaggagcttgggggatgactagaggcagggaggggactatttatgaaggcaaaaaaattaaattatttatttatggaggatggagagaggggaataatagaagaacatccaaggagaaacagagacaggcccaagagatgaagagtgagagggcatgcgcacaaggctgaccaagagagaaagaagtaggcatgagggatcacagggccccagaaggcagggaaaggctctgaaagccagctgccgaccagagccccacacggaggcatctgcaccctcgatgaagcccaataaacctcttttctctg

SEQ ID NO: 363 - DNA, 2804 bp, Homo sapiens
atcgatgccccgcccccgccccacagccaacctcccgggcaccgttgcccgcccggggcccgctaccggcccaggccccgcctcgcgagtcctcctccccgggtgcctgcccgcagcccgctcggcccagagggtgggcgcggggctgcctctaccggctggcggctgtaactcagcgaccttggcccgaaggctctagcaaggacccaccgaccccagccgcggcggcggcggcgcggactttgcccggtgtgtggggcggagcggactgcgtgtccgcggacgggcagcgaagatgttagccttcgctgccaggaccgtggtgaagcctctgggcttcctgaagcccttctccttgatgaaggcttccagccgcttcaaggcacaccaggatgcactgccacggctgcccgtgccccctctccagcagtccctggaccactacctgaaggcgctgcagcccatcgtgagtgaggaggagtgggcccacaccaagcagctggtggatgagtttcaggcctcaggaggtgtaggggagcgcctgcagaaggggctggagcgtcgggccaggaagacggagaactggctgtctgagtggtggctcaagaccgcctacctccagtaccgccagcctgtggtcatctactcgagcccaggcgtgatgctacccaagcaggacttcgtggacctgcagggtcagctccgatttgctgccaaactcattgagggtgtgttggatttcaaggtcatgattgacaacgagaccctgcccgtggagtacctgggggggaagccactgtgcatgaaccagtactatcagatcttgtcctcctgccgagtgccgggccccaagcaggacacagtcagcaacttcagcaagaccaagaagcctcccacgcacatcaccgtggtacacaactaccagttttttgagctggatgtgtaccacagtgacgggacacccctcactgcggatcagatctttgtgcagctggagaagatctggaactcatccctacagaccaacaaggagcctgtgggcatcctcacctccaaccaccgcaactcctgggccaaggcatacaacaccctcatcaaagacaaggtgaaccgggattccgtgcgctccatccagaagagcatcttcaccgtgtgcctagatgcaaccatgcccagggtctcagaagacgtgtaccgcagccacgtggcaggccagatgctgcatgggggcggcagcaggctcaacagcggcaaccgctggttcgacaagacgctgcagttcatcgtggcagaagatggctcctgtgggcttgtgtacgagcatgctgcagcggaggggccccctattgtcacccttctggactatgtcatcgagtacacgaagaaacccgagcttgtgcggtctcccatggtgcccctgcccatgcccaagaagctgcggttcaacatcacccccgagatcaagagcgacatcgagaaggccaagcagaacctcagcatcatgatccaggacctggatatcaccgtgatggtgttccaccattttggaaaagacttccccaagtcggagaagctaagcccagatgccttcatccagatggctttgcagctggcctactacaggatctacggacaggcatgtgccacctatgaaagtgcctccctgcgcatgtttcacctgggccgcaccgacaccatccgctcggcttccatggactcactcacctttgtcaaggccatggatgactccagcgtcacggagcaccagaaggtggagctgctgcggaaggccgtgcaggcccaccgaggctacaccgaccgggccatccgcggggaggcctttgatcgacacctgctgggcctgaagctgcaggccatcgaggacctggtgagcatgcccgacatcttcatggacacctcctacgccatcgccatgcacttccacctctccaccagccaggtccctgccaagacagactgtgtcatgttcttcgggcccgtggtccccgacggctacggtgtctgctataaccccatggaggcccacatcaacttctccctgtcggcctacaacagctgcgcggagaccaacgccgcccgcctggcgcattacctggagaaggcgctcctggacatgcgtgccctgctgcagagccacccccgggccaagctctgagcccctaggactcaggcctgccaatgccacagccaagcccaccctgggatgggccacccaccagggctcagctccttggttccctcttccttggttccctcttccctggtccccccaaatctactgagccacggaccgcatcctccagggggcctgcaggccccagccaagtgccttccgtgggtcatcccagcacctgccagggcccgacctggggctgagtgcagaggctgagcaggacgttaggcccgggcccctggcacgtcctccaccggtgcctcctctggggaagggaaccagccctccagagcaggagactggcaagagctctttgtctcaccagctcagccccggccactccctgccaactccatgaccaggccaccatctgtaccctgcttcccaaactcccaggacctggagacaggattgtctggggccgaggggccagggtgtgaggtttcacctccgttgcggctgtgctcctgtggataacattgctagcgagccgcctctggttccactcagcttggttcctgcccccgccctgctgtatgatattaatgtggaaggtcatcaataaaggggaattgtgttggtgaaaaaaaaaaaaaaaaaaaaaaaaaaa

SEQ ID NO: 364 - DNA, 735 bp, Homo sapiens
gagtctgcccttgcgagctcagagtgtgcccgtgcgccgccgccgtcgtacctgccgccgccgccaccgccaccatgcccaacttcgccggcacctggaagatgcgcagcagcgagaatttcgacgagctgctgaaggcactgggtgtgaacgccatgctgaggaaagtggccgtagcggctgcgtccaagccgcacgtggagatccgccaggacggggatcagttctacatcaagacatccaccaccgtgcgcaccactgagatcaacttcaaggtcggagaaggctttgaggaggagaccgtggacggacgcaagtgcaggagtttagccacttgggagaatgagaacaagatccactgcacccaaactcttcttgaaggggacggccccaaaacctactggacccgtgagctggccaacgatgaacttatcctgacgtttggcgccgatgacgtggtctgcaccagaatttatgtccgggaatgaaggcagctggcttgctcctactttcaggaagggatgcaggtccccgaggaatatgtcatagttctgagctgccagtggaccgcccttttcccctaccaatattaggtgatcccgttttccccatgacaatgttgtagtgtcccccacccccacccccctggccttggtgcctcttgtatccctagtgctgcatagcccggcatttgcacggtttcgaagtcattaaactggttagacgtgtctcaaa

SEQ ID NO: 365 - DNA, 1903 bp, Homo sapiens
gggcaacggaggggaaataaaagggaacggctccgaatctgccccagcggccgctgcgagacctcggcgccgacatcgcgacagcgaagcgctttgcacgccaggaaggtcccctctatgtgctgctgagccggtcctggacgcgacgagcccgccctcggtcttcggagcagaattcgcaaaaacggaaggactggaaatggcagaccatatgatggcaatgaaccacgggcgcttccccgacggcaccaatgggctgcaccatcaccctgcccaccgcatgggcatggggcagttcccgagcccccatcaccaccagcagcagcagccccagcacgccttcaacgccctaatgggcgagcacatacactacggcgcgggcaacatgaatgccacgagcggcatcaggcatgcgatggggccggggactgtgaacggagggcaccccccgagcgcgctggcccccgcggccaggtttaacaactcccagttcatgggtcccccggtggccagccagggaggctccctgccggccagcatgcagctgcagaagctcaacaaccagtatttcaaccatcacccctacccccacaaccactacatgccggatttgcaccctgctgcaggccaccagatgaacgggacaaaccagcacttccgagattgcaaccccaagcacagcggcggcagcagcacccccggcggctcgggcggcagcagcacccccggcggctctggcagcagctcgggcggcggcgcgggcagcagcaacagcggcggcggcagcggcagcggcaacatgcccgcctccgtggcccacgtccccgctgcaatgctgccgcccaatgtcatagacactgatttcatcgacgaggaagttcttatgtccttggtgatagaaatgggtttggaccgcatcaaggagctgcccgaactctggctggggcaaaacgagtttgattttatgacggacttcgtgtgcaaacagcagcccagcagagtgagctgttgactcgatcgaaaccccggcgaaagaaatcaaacccccaacttcttcggcgtgaattaaaagaaacattcccttagacacagtatctcacttttcagatcttgaaaggtttgagaacttggaaacaaagtaaactataaacttgtacaaattggttttaaaaaaaattgctgccactttttttcctgtttttgtttcgtttttgtagccttgacattcacccacctcccttatgtagttgaaatatctagctaacttggtctttttcgttgtttgtttttactcctttccctcactttctccagtgctcaactgttagatattaatcttggcaaactgcttaatcttgtggattttgtagatggtttcaaatgactgaactgcattcagatttacgagtgaaaggaaaaattgcattagttggttgcatgaacttcgaagggcagatattactgcacaaactgccatctcgcttcatttttttaactatgcatttgagtacagactaatttttaaaatatgctaaactggaagattaaacagatgtgggccaaactgttctggatcaggaaagtcatactgttcactttcaagttggctgtcccccccgccgccccccccacccccatatgtacagatgataatagggtgtggaatgtcgtcagtggcaaacatttcacagatttttattttgtttctgtcttcaacatttttgacactgtgctaatagttatattcagtacatgaaaagatactactgtgttgaaagctttttaggaaattttgacagtatttttgtacaaaacatttttttgaaaaaatacttgttaatttattctattttaatttgccaatgtcaataaaaagttaagaaaaaaaaaaaaaaaaaaaaaa

SEQ ID NO: 366 - DNA, 1145 bp, Homo sapiens
gctccggccagccgcggtccagagcgcgcgaggttcggggagctccgccaggctgctggtacctgcgtccgcccggcgagcaggacaggctgctttggtttgtgacctccaggcaggacggccatcctctccagaatgaagatcttcttgccagtgctgctggctgcccttctgggtgtggagcgagccagctcgctgatgtgcttctcctgcttgaaccagaagagcaatctgtactgcctgaagccgaccatctgctccgaccaggacaactactgcgtgactgtgtctgctagtgccggcattgggaatctcgtgacatttggccacagcctgagcaagacctgttccccggcctgccccatcccagaaggcgtcaatgttggtgtggcttccatgggcatcagctgctgccagagctttctgtgcaatttcagtgcggccgatggcgggctgcgggcaagcgtcaccctgctgggtgccgggctgctgctgagcctgctgccggccctgctgcggtttggcccctgaccgcccagaccctgtcccccgatcccccagctcaggaaggaaagcccagccctttctggatcccacagtgtatgggagcccctgactcctcacgtgcctgatctgtgcccttggtcccaggtcaggcccaccccctgcacctccacctgccccagcccctgcctctgcccaagtgggccagctgccctcacttctggggtggatgatgtgaccttccttgggggactgcggaagggacgagggttccctggagtcttacggtccaacatcagaccaagtcccatggacatgctgacagggtccccagggagaccgtgtcagtagggatgtgtgcctggctgtgtacgtgggtgtgcagtgcacgtgagagcacgtggcggcttctgggggccatgtttggggagggaggtgtgccagcagcctggagagcctcagtccctgtagccccctgccctggcacagctgcatgcacttcaagggcagcctttgggggttggggtttctgccacttccgggtctaggccctgcccaaatccagccagtcctgccccagcccacccccacattggagccctcctgctgctttggtgcctcaaataaatacagatgtcccc

SEQ ID NO: 367 - DNA, 2164 bp, Homo sapiens
atgcccagcaggaccgaccccaagatggaagggagcggcggccgcgtccgcctcaaggcgcattacgggggggacatcttcatcaccagcgtggacgccgccacgaccttcgaggagctctgtgaggaagtgagagacatgtgtcgtctgcaccagcagcacccgctcaccctcaagtgggtggacagcgaaggtgacccttgcacggtgtcctcccagatggagctggaagaggctttccgcctggcccgtcagtgcagggatgaaggcctcatcattcatgttttcccgagcacccctgagcagcctggcctgccatgtccgggagaagacaaatctatctaccgccggggagccagaagatggaggaagctgtaccgtgccaacggccacctcttccaagccaagcgctttaacaggagagcgtactgcggtcagtgcagcgagaggatatggggcctcgcgaggcaaggctacaggtgcatcaactgcaaactgctggtccataagcgctgccacggcctcgtcccgctgacctgcaggaagcatatggattctgtcatgccttcccaagagcctccagtagacgacaagaacgaggacgccgaccttccttccgaggagacagatggaattgcttacatttcctcatcccggaagcatgacagcattaaagacgactcggaggaccttaagccagttatcgatgggatggatggaatcaaaatctctcaggggcttgggctgcaggactttgacctaatcagagtcatcgggcgcgggagctacgccaaggttctcctggtgcggttgaagaagaatgaccaaatttacgccatgaaagtggtgaagaaagagctggtgcatgatgacgaggatattgactgggtacagacagagaagcacgtgtttgagcaggcatccagcaaccccttcctggtcggattacactcctgcttccagacgacaagtcggttgttcctggtcattgagtacgtcaacggcggggacctgatgttccacatgcagaggcagaggaagctccctgaggagcacgccaggttctacgcggccgagatctgcatcgccctcaacttcctgcacgagagggggatcatctacagggacctgaagctggacaacgtcctcctggatgcggacgggcacatcaagctcacagactacggcatgtgcaaggaaggcctgggccctggtgacacaacgagcactttctgcggaaccccgaattacatcgcccccgaaatcctgcggggagaggagtacgggttcagcgtggactggtgggcgctgggagtcctcatgtttgagatgatggccgggcgctccccgttcgacatcatcaccgacaacccggacatgaacacagaggactaccttttccaagtgatcctggagaagcccatccggatcccccggttcctgtccgtcaaagcctcccatgttttaaaaggatttttaaataaggaccccaaagagaggctcggctgccggccacagactggattttctgacatcaagtcccacgcgttcttccgcagcatagactgggacttgctggagaagaagcaggcgctccctccattccagccacagatcacagacgactacggtctggacaactttgacacacagttcaccagcgagcccgtgcagctgaccccagacgatgaggatgccataaagaggatcgaccagtcagagttcgaaggctttgagtatatcaacccattattgctgtccaccgaggagtcggtgtgaggccgcgtgcgtctctgtcgtggacacgcgtgattgaccctttaactgtatccttaaccaccgcatatgcatgccaggctgggcacggctccgagggcggccagggacagacgcttgcgccgagaccgcagagggaagcgtcagcgggcgctgctgggagcagaacagtccctcacacctggcccggcaggcagcttcgtgctggaggaacttgctgctgtgcctgcgtcgcggcggatccgcggggaccctgccgagggggctgtcatgcggtttccaaggtgcacattttccacggaaacagaactcgatgcactgacctgctccgccaggaaagtgagcgtgtagcgtcctgaggaataaaatgttccgatgaaaaaaaaaa

SEQ ID NO: 368 - DNA, 2490 bp, Homo sapiens
aagcctgtgttggatttgtgattcagggtcatggtgaccctgatccagtttgggtggaaatccttcctaagtatcataagaagcatcttggcagagatgctttggtggcagccatgagctttgctggaggccttgcttcccatagccttggctgtggggcaaggaactctgccaggcgagggggatgctgccctggatcaacagaagcctggtgggtttgctcgtgttagagtgtcctgccttcttactgacaactcttctcggtgatagcctctcttccctggattgtgacatatggaatgacagtgcaggtaccaccgaggctagcacagtcaagcctccagctaagctggatccctgaagcctgctatcacgcagacaggctatgcggctgcctcggaccatgctaggccacttgctggggtgtcaacctaccaccaaaggggtcttttagcaaacctcatggggaacaggaacattcctgctcatccctggccacaggctgcagacccagcactggcccttgcgtgagtcagagcctggggctggccctagccccttctactgacttcctcatttaagccaattatataagctcacattgatcagggagggagggaaagagctaaagagggtcacacaagtggctattttccctgcagtgtttctgtgtggtgaaaataacccagtccactaaggggcggggagtgaatggatggctggattttccccaagctccttatagcctaatgttgtcaggatgtgagtatgaggaatttagcctcttatagtgaaatgagtccaactctgggctttgcttagaggagagctcctgtcaggcttcctataatatgaaaagaagtcaccattggggaactagagaccccagaccttgtcatatggatatttgagaatgtaatgcatctcaggcctcgtgctggaactctagggcactctaggcaggctcagaacacttgatattcctgacagctacacacctgacatgcaggtacatacctgatcggtgtcatctcctaacaaggattttcagttcctcgggagagcaataatctttgtaggaaagacatccctgcaataggtgatatgtggtccttagaagttttattcctttactacttggaagaaaagttctttggtgattcttctctgcttttgaagatgatcaaaagcatcttcattgattttctgaaacgaaagccttgtctgaaaccaattaatacttgggaaacagctgggcttggaggagtagaatgccagagataaatccatggctcctgctctggctctcttctgcagaaatgagggcaacagtgaggccacttccctggcaaatgtgcagctcaggatagggaagcataagaccctctgtttaaaagagagtcaagtaggtaaccaaagccaagctctgtgcaaggtgctttggagttgtaaattgaggagtgcatccttgctgtcttgaaccattctgtttgcaatggtgagaccttacataacctagccttgcagggccgccacacaaccctggagtcctagagttggaggaacctttgtatccatctgacttctcattttgcagaatatgatgagaaagtagaggatcgctctgttcaccactcttgctattccattagtggggagatgcctgctagcatgtgtgaggggaacactctgatacactgggaagtatcggaaattcccagaaacacaaacataaaataactctcctagacccaggtactggggactgtctcagtccgtgtggcatgataaataaaaggttaggatcaagtctttgtatttttcaagttgtggtagctgattattcctgttttaagtactctgaaattgatctgtgatcaataatactaatatgttatcttttaccgtattctgcctctcactattgattttaattagttaggagtatttgagctgttatttcttgagcttaatatttttttagagttaactctttaaggagataatcatggctgtagacaaggccagggctggctgacgtgccttagaaggtttgaatgcaataaagcggtgtttggcgttctcctgcattgtagtgcgggtacaaaatgctatttgttcgtcatactgttgtcagcagatgagccgcccactacagacggctactgcccagggacctgcccaggccccacccaagggctcccaagggttgagatttctgcagacctatagccagcacacttagtcctgccctatatagagttcctcttcgggaagcttttgataaggaattctcagaccgatagggtgtctgtctgggctttgctgcgggacagtctaactgtgggggctaggggaaagcaggagagtatcgatcaaagagtaagccacacacggataatcagttactagggatggaggtgtgagggttcattatattattcattttactgttgtatatgtttgaaaatgtctataataaaaagcttt

SEQ ID NO: 369 - DNA, 1568 bp, Homo sapiens
gaattccggccaagatggcagcaatgaggaaggcgcttccgcggcgactggtgggcttggcgtccctccgggctgtcagcacctcatctatgggcactttaccaaagcgggtgaaaattgtggaagttggtccccgagatggactacaaaatgaaaagaatatcgtatctactccagtgaaaatcaagctgatagacatgctttctgaagcaggactctctgttatagaaaccaccagctttgtgtctcctaagtgggttccccagatgggtgaccacactgaagtcttgaagggcattcagaagtttcctggcatcaactacccagtcctgaccccaaatttgaaaggcttcgaggcagcggttgctgctggagccaaggaagtagtcatctttggagctgcctcagagctcttcaccaagaagaacatcaattgttccatagaggagagttttcagaggtttgacgcaatcctgaaggcagcgcagtcagccaatatttctgtgcgggggtacgtctcctgtgctcttggctgcccttatgaagggaagatctccccagctaaagtagctgaggtcaccaagaagttctactcaatgggctgctacgagatctccctgggggacaccattggtgtgggcaccccagggatcatgaaagacatgctatctgctgtcatgcaggaagtgcctctggctgccctggctgtccactgccatgacacctatggtcaagccctgaccaacaccttgatggccctgcagatgggagtgagtgtcgtggactcttctgtggcaggacttggaggctgtccctacgcacagggggcatcaggaaacttggccacagaagacctggtctacatgctagagggcttgggcattcacacgggtgtgaatctccagaagcttctggaagctggaaactttatctgtcaagccctgaacagaaaaactagctccaaagtggctcaggctacctgtaaactctgagccccttgcccacctgaagccctggggatgatgtggaaataggggcacacacagatgattcatggatggggacatggaaatgagaataggttaaatggtgcaggtacctcatagccagctctacacagaggtctctcctggcagaaagcaggcgaagggcaggaggagctgcttggcagaaggacctcctgcccagacctgaggagtgagaggctttgagggctgaagtctccctttgttacggaccctggcccaggagttgaatgcctgaggacgtgtgggaaccccgttccctacttagcatgatccttgagtctcctctctggatggaatccgcgagctggccacctggccaccctctacacggctccaccctgccatggccgtggggcccttgctctctgacttctcaggacacaggtcatggaggttcttcccaagctggcagaggccatttgtggaaagtggagagctacgtggtggccgtctgccaactccagcatctctggaaaatctccacgctgaatgtgatttttgaaaacagcttatgtaattaaaggttgaatggcacatcat

SEQ ID NO: 370 - DNA, 3431 bp, Homo sapiens
gggggaggagggcggtcgtccggggttaggttgagggggggcgtcggtccgttctgggcgggggatgactcacagcccatcccatctccccgacgccgcccgcccgcgcagtgctagctccatggcttagcggaggaggcggcagtggcgagctggggggaggggggactcttattttgttagggggaccgggccgaggcccgaccggcctggcagggctcgcccggggccgggcgtcatgtctcatgcggccgaaccagctcgggatggcgtagaggccagcgcggagggccctcgagccgtgttcgtgctgttggaggagcgcaggccggccgactcggctcagctgctcagcctgaactctttgcttccggaatccgggattgttgctgacatagaattagaaaacgtccttgatcctgacagcttctacgagctcaaaagccaacccttaccccttcgctcaagcctcccaatatcactgcaggccacaccagccaccccagctacactctctgcatcgtcttctgcagggggctccaggacccctgccatgtcgtcatcttcttcatcgagggtcttgctgcggcagcagctaatgcgggcccaggcgcaggagcaggagaggcgtgagcgtcgggaacaggccgccgcggctcccttccccagtcctgcacctgcctctcctgccatctctgtggttggcgtctctgctgggggccacacattgagccgtccaccccctgctcaggtgcccagggaggtgctcaaggtgcagacccatctggagaacccaacgcgctaccacctgcagcaggcgcgccggcagcaggtgaaacagtacctgtccaccacactcgggcccaagctggcttcccaggccctcaccccaccgccggggcccgcaagtgcccagccactgcctgcccctgaggctgcccacactaccggccccacaggcagtgcgcccaacagccccatggcgctgctcaccatcgggtccagctcagagaaggagattgatgatgtcattgatgagatcatcagcctggagtccagttacaatgatgaaatgctcagctatctgcccggaggcaccacaggactgcagctccccagcacgctgcctgtgtcagggaatctgcttgatgtgtacagtagtcaaggcgtggccacaccagccatcactgtcagcaactcctgcccagctgagctgcccaacatcaaacgggagatctctgagaccgaggcaaaggcccttttgaaggaacggcagaagaaagacaatcacaacctaattgagcgtcgcaggcgattcaacattaacgacaggatcaaggaactgggcactctcatccctaagtccagtgacccggagatgcgctggaacaagggcaccatcctgaaggcctctgtggattatatccgcaagctgcagaaggagcagcagcgctccaaagacctggagagccggcagcgatccctggagcaggccaaccgcagcctgcagctccgaattcaggaactagaactgcaggcccagatccatggcctgccagtgcctcccactccagggctgctttccttggccacgacttcggcttctgacagcctcaagccagagcagctggacattgaggaggagggcaggccaggcgcagcaacgttccatgtaggggggggacctgcccagaatgctccccatcagcagccccctgcaccgccctcagatgcccttctggacctgcactttcccagcgaccacctgggggacctgggagaccccttccacctggggctggaggacattctgatggaggaggaggagggggtggtgggaggactgtcggggggtgccctgtccccactgcgggctgcctccgatcccctgctctcttcagtgtcccctgctgtctccaaggccagcagccgccgcagcagcttcagcatggaagaggagtcctgatcaggcctcacccctcccctgggactttcccacccaggaaaggaggaccagtcaggatgaggccccgccttttcccccaccctcccatgagactgccctgcccaggtatcctgggggaagaggagatgtgatcaggccccacccctgtaatcaggcaaggaggaggagtcagatgaggccctgcaccttccccaaaggaaccgcccagtgcaggtatttcagaaggagaaggctggagaaggacatgagatcagggcctgccccctggggatcacagcctcacccctgcccctgtgggactcatccttgcccaggtgagggaaggagacaggatgaggtctcgaccctgtcccctagggactgtcctagccaggtctcctgggaaagggagatgtcaggatgttgctccatcctttgtcttggaaccaccagtctagtccgtcctggcacagaagaggagtcaagtaatggaggtcccagccctgggggtttaagctctgccccttccccatgaaccctgccctgctctgcccaggcaaggaacagaagtgaggatgagacccagccccttcccctgggaactctcctggccttctaggaatggaggagccaggccccaccccttccctataggaacagcccagcacaggtatttcaggtgtgaaagaatcagtaggaccaggccaccgctagtgcttgtggagatcacagccccacccttgtccctcagcaacatcccatctaagcattccacactgcagggaggagtggtacttaagctcccctgccttaacctgggaccaacctgacctaacctaggagggctctgagccaaccttgctcttggggaaggggacagattatgaaatttcatggatgaattttccagacctatatctggagtgagaggcccccacccttgggcagagtcctgccttcttccttgaggggcagtttgggaaggtgatgggtattagtgggggactgagttcaggttaccagaaccagtacctcagtattctttttcaacatgtagggcaagaggatgaaggaaggggctatcctgggacctccccagcccaggaaaaactggaagccttcccccagcaaggcagaagcttggaggagggttgtaaaagcatattgtaccccctcatttgtttatctgatttttttattgctccgcatactgagaatctaggccaccccaacctctgttccccacccagttcttcatttggaggaatcaccccatttcagagttatcaagagacactcccccctccattcccacccctcatacctacacccaaggttgtcagctttggattgctggggccaggccccatggagggtatactgaggggtctataggtttgtgattaaaataataaaagctaggcgtgtttgatgcgcttttaactttgaaaaaaaaaaaaaaaaaaaaaaaaaaaaaaaaaaaaaa

SEQ ID NO: 371 - DNA, 1068 bp, Homo sapiens
cgccggaggagttctgcgtctcggggtggtgactgggtccagaatggcttcggattcggggaaccaggggaccctctgcacgttggagttcgcggtgcagatgacctgtcagagctgtgtggacgcggtgcgcaaatccctgcaaggggtggcaggtgtccaggatgtggaggtgcacttggaggaccagatggtcttggtacacaccactctacccagccaggaggtgcaggctctcctggaaggcacggggcggcaggcggtactcaagggcatgggcagcggccagttgcagaatctgggggcagcagtggccatcctgggggggcctggcaccgtgcagggggtggtgcgcttcctacagctgacccctgagcgctgcctcatcgagggaactattgacggcctggagcctgggctgcatggactccacgtccatcagtacggggaccttacaaacaactgcaacagctgtgggaatcactttaaccctgatggagcatctcatgggggcccccaggactctgaccggcaccgcggagacctgggcaatgtccgtgctgatgctgacggccgcgccatcttcagaatggaggatgagcagctgaaggtgtgggatgtgattggccgcagcctgattattgatgagggagaagatgacctgggccggggaggccatcccttatccaagatcacagggaactccggggagaggttggcctgtggcatcattgcacgctccgctggccttttccagaaccccaagcagatctgctcttgcgatggcctcaccatctgggaggagcgaggccggcccatcgctggcaagggccgaaaggagtcagcgcagccccctgcccacctttgagcaggacctcaccttggctctgttgctgtcctccagggcgagcactttccacttccagagggggccagagggactttgcctgcccagtctttggagagctcagtacagggcaggagctgctgtggtgttcccttggcaaatgaaagttttattttcgtttgggaaaaaaaaaaaaaaaaaaaaaaaaaaaaaaaaaaaaa

SEQ ID NO: 372 - DNA, 1327 bp, Homo sapiens
ggtcgacgacgtggcagccgggatgcactaggcaaagccagctgggctcctgagtccggtgggtacttggagaacttactacgtctagctggaggattgtaaatgtaccaatcagcatgctgtgtctagctcaagaactcaagctccatgaggagatgtttcattgtcgagagcagtcatgatggcctgcactccacacaatgcaacagagtgaaagagcaggttctgcttctttggtgtagtcctgaagcttcctaagaaacttcacatcaggtgatggataggagcaaccctgtaaaaccagccttagactattttttaaacaggctggtgaattaccagatctccgtcaagtgcagtaaccagttcaagttggaagtgtgtcttttgaatgcagaaaacaaagtcgtggacaaccaggctgggacccagggccagctgaaggtgctgggtgccaacctctggtggccgtacctgatgcacgaacaccccgcctacctctactcgtgggaggatggtgattgctcacaccaaagccttggacccctcccagcctgtgacctttgtgaccaactccacctacgcagcagacaagggggctctgtatgtggatgtgatccgtgtgaacagctactactcttggtatcgcaactacgggcacctggagttgattcagctgcagctggccgcccagtttgagaattggtgtaagacatcacaatcccattattcagagcgcgtatggagtggaaacgcttgtagggtttcaccagtctttcccagggaactccgatgaagtgttccaacaaaatgagcgagtgaaccaagaagaggatgacattagatccaggagatacaacagaggagataatctccaggatgcctgtgaagaaagatccctggatcccaggatgattataggacaagttgttcataatccagcaggccagaagacttccagggaaactcattcaaggaggtgaaaatgatggatgactcctccaagatgaaaatggaccagccgcagtgctcacgcctgtaataccagcactttgggaggctgaggcaggcggatcacttgaggtcaggagtttgaaactagcctggccaacgtggcaaaactccatctctattaaaaatacaaaaattagccaggcatagtggtgcatgcctgtagtcccagctacttgggatgccgaggcaggaagaattgcttgaacctgggaggcagagtctgcagtgagccgagatcatgccactgcactccagcctgggtgacagagccactccgtctcaaaaaaaaaaaaaaaaaaaaaaaaaaaaaaaa

SEQ ID NO: 373 - DNA, 752 bp, Homo sapiens
  misc_feature (676)..(678): N may be C, G,T, or A
  misc_feature (676)..(678): N may be C, G,T or A
gggggatgccggcatcagaagaatgtttcgtgttcgaaattgtttgaggggtttgggtttatttttgttggttttttcttttttttttttgcttacgtgggcatccttcagcttttaataatctgaaaaattctatttacccattgtcaatgtgtataaattaatctcagtcaattttatacaataaaaggtgaacttttatccatcaaacaataatttaacaaaaaatgtaccggaagaagaatgttcattacaaatataggaaacataaatattaccaaatattggcaagcactaaaatgttcagaaatataagtctattacagttatagctctctcaagcaaaaaaacagcagagaaaaacttagttttcctgaggggctatttatttacttagggatttgttaaaaggtcaaatggggtcacacagaatactaagaagagctgttcacccaggcctcactaagaactcttcttcatgcagtagctatatagtaatatgacaactgctcctacgacccaaagaggaactacagcaactactctttagcatctgttgctcccaactctgctttgcaattatatgactcaagcattctggctcccttaactattactgctggtactcccaagaaattcccctctaaaaaataaaaattttttaaagctgaaaagnnncggccacacaaaaaaaaaaaacccttgtggggccgccttcgccccttcaaaaaactttttcaaacccttttctt

SEQ ID NO: 374 - DNA, 2490 bp, Homo sapiens; identical to SEQ ID NO: 368

SEQ ID NO: 375 - DNA, 3753 bp, Homo sapiens
gcggcgggagaagatggtggcgctggaggcagcagcggctggagcggagctttattcccaggcttggcaccagcgctgtcactagcgccgcctgctcccgcgggcccgcggacccagctgtcaggcaagcccagtggagcaaaatgagagcgcagtgagccgggcccagcttctctcctagccgttccgactcccaccatgaaccacttggaggggtctgcggaggtggaggtgaccgacgaggcggcaggtggggaggtgaacgagtcggtggaggccgacctggagcaccccgaggtggaagaggaacagcagcagccgccgcagcagcagcactatgtgggccgccaccagcgcgggcgagccctcgaggacctccgcgcccagctcggccaggaggaagaggagcgcggggaatgcctggcgcgctcagccagcacggagagcggcttccacaaccacacggacaccgccgagggcgacgtgatcgccgcggcccgcgacggctacgatgcggagcgcgcgcaggaccccgaggacgagagcgcctatgctgtgcagtaccggcccgaggccgaggagtacacggagcaggcagaggccgagcacgccgaggccacgcaccgccgcgcgctgcccaaccacctgcacttccactcgctggagcacgaggaagccatgaatgcggcctactcaggctacgtctacacgcaccggctcttccaccgcggtgaggacgagccctactccgagccctatgccgactacggcggcctccaggagcacgtgtacgaggagataggggacgcgcccgagctgcacgcacgcgacggtctgcggctctacgagcaggagcgcgacgaggcggccgcgtaccgccaggaggccctgggcgcgcggctgcaccattacgacgagcgctccgacggcgagtccgacagccccgagaaggaggccgagttcgcgccctacccgcgcatggacagctacgagcaggaggaggacatcgaccagatagtggccgaggtgaagcagagcatgagctcgcagagcctcgacaaggcagccgaggacatgcctgaggccgagcaggacctggagcgtccccctaccccggccgggggtcgccccgacagccccgggctgcaggcgccggcggggcagcagcgggcggtgggccccgcgggcggcggcgaggcggggcagcggtacagcaaggagaagcgcgatgccatctcgctggccatcaaggacatcaaggaggccatcgaggaggtgaaaaccaggaccatccgttcgccttacacccccgacgagcccaaagagcccatctgggtcatgcgccaggacattagccccaccagggactgtgacgaccagaggccgatggacggagattctccgtctcctggcagctcctcccccttgggtgcagagtcatcaagcacatctcttcaccccagtgaccctgtggaagtgcccattaataaagagtcaagaaaaagcttggcttcattcccaacctacgttgaagttccgggaccctgcgaccccgaagacttgatcgatggaatcatttttgccgccaattaccttggctccactcagctgctctcagacaaaactccttccaaaaacgtgcgcatgatgcaggcccaggaagccgtaagcaggatcaagatggcccagaaattagccaaaagcaggaagaaggctcctgaaggcgaatctcagccaatgactgaagtggacctcttcattcttacccagagaatcaaagtgctgaacgccgacacacaggagacaatgatggaccaccctctgaggaccatttcctacattgcggacattgggaacatcgttgtgctgatggcccgccggcggatacctcgctccaactcccaggagaacgtggaagcgtcccacccatcccaggatgggaaaaggcagtacaagatgatctgccacgtcttcgagtctgaggatgctcagctgattgcacagtccatcggacaggcatttagcgtggcataccaggaattcctcagggccaatgggattaaccccgaagatctcagccagaaggagtatagtgacctgctcaatacccaggacatgtacaacgatgacctgatccacttctccaagtcggaaaactgtaaagatgttttcatagagaagcagaaaggagaaatcctaggtgtggtgattgtggagtctggctggggatccatcctccccaccgtgatcattgccaacatgatgcatggtggccctgcggagaaatctgggaagctgaatatcggtgaccagatcatgtccattaatggcaccagcctggtgggcctgcctctgtccacctgccagagcattattaagggcttagagaatcagtcccgagtcaagctgaatatcgtgagatgtcctccggtgaccaccgtgttaatcagaagaccagaccttcgctaccagctcggtttcagcgtccagaatggaattatctgcagcctcatgcgagggggaatagctgagagaggaggcgtccgtgtggggcaccggatcattgaaatcaatggacagagcgtcgtggccaccccccacgagaagatcgtccacattctctccaatgctgttggggagattcatatgaagacaatgccagccgcgatgtacaggctgctgacggcccaggagcagcctgtttacatctgaccgcggccacacgcggtggcatgcatggaggactctcctcttcgtggttgtgtttctcgtgctgcatccctgtgtccactgagactttcccctctcgcgcccagcatttggttttacacaggaagagaagaatccacaaggacctctttactctctccgatttgctttttttttttttttttttcaataccagggaagtttcgtatgcactcccttgaggatggagagcagccagcacccacctggtactgacccaggaccatcctggagggctttctgggtgtgtccagggggtgggctgtcactgcttgagggagaatcctcccttcccaggaggtgcagacttcttaaaaggagctcgcggggcagcaaagcagctgattcagcagtgcctaaaacccagttgctgatccctgctctctgagtttatctgtgggaatgtggtagtacccagggccagcccacgtcattaaggttatgcactgcctgccatgtagttggggcaccatacattatttcttcccagaatctctgagccaaccttaaacctcttctattgctagttctaatttcaacgtatgtgtgttttctaatacgagccttctcaccccaggataaaaggggaaataactgccttgggcaaggacaccatagtgtcacagagagcttggcaattcatggggcatctgaagctttaccaggttgtcctcaagttatcaaccattagataaacacaggcaggtactgtctgcttctctctctctcacacacacacacacacacacagtcccattcggatatcacccttccctgctcccaccaccagtgagacaagctgaagattaggcacacagatcccctggaaacccacctctctggaaggtcccttccctggcaggtggtcaggcaggcgggggctgttcagcctcatcctgagagacctgtcctctctgtgctgaggtccagcccctccagcaccactttggcttatcgtatcctcctcctggacttaccctctctgccgaacacacatcccaggcg

SEQ ID NO: 376 - DNA, 1759 bp, Homo sapiens
cccctgcctctcggactcgggctgcggcgtcagccttcttcgggcctcggcagcggtagcggctcgctcgcctcagccccagcgcccctcggctaccctcggcccaggcccgcagcgccgcccgccctcggccgccccgacgccggcctgggccgcggccgcagccccgggctcgcgtaggcgccgaccgctcccggcccgccccctatgggccccggctagaggcgccgccgccgccggcccgcggagccccgatgctggcccggaggaagccggtgctgccggcgctcaccatcaaccctaccatcgccgagggcccatcccctaccagcgagggcgcctccgaggcaaacctggtggacctgcagaagaagctggaggagctggaacttgacgagcagcagaagaagcggctggaagcctttctcacccagaaagccaaggtcggcgaactcaaagacgatgacttcgaaaggatctcagagctgggcgcgggcaacggcggggtggtcaccaaagtccagcacagaccctcgggcctcatcatggccaggaagctgatccaccttgagatcaagccggccatccggaaccagatcatccgcgagctgcaggtcctgcacgaatgcaactcgccgtacatcgtgggcttctacggggccttctacagtgacggggagatcagcatttgcatggaacacatggacggcggctccctggaccaggtgctgaaagaggccaagaggattcccgaggagatcctggggaaagtcagcatcgcggttctccggggcttggcgtacctccgagagaagcaccagatcatgcaccgagatgtgaagccctccaacatcctcgtgaactctagaggggagatcaagctgtgtgacttcggggtgagcggccagctcatagactccatggccaactccttcgtgggcacgcgctcctacatggctccggagcggttgcagggcacacattactcggtgcagtcggacatctggagcatgggcctgtccctggtggagctggccgtcggaaggtaccccatccccccgcccgacgccaaagagctggaggccatctttggccggcccgtggtcgacggggaagaaggagagcctcacagcatctcgcctcggccgaggccccccgggcgccccgtcagcggtcacgggatggatagccggcctgccatggccatctttgaactcctggactatattgtgaacgagccacctcctaagctgcccaacggtgtgttcacccccgacttccaggagtttgtcaataaatgcctcatcaagaacccagcggagcgggcggacctgaagatgctcacaaaccacaccttcatcaagcggtccgaggtggaagaagtggattttgccggctggttgtgtaaaaccctgcggctgaaccagcccggcacacccacgcgcaccgccgtgtgacagtggccgggctccctgcgtcccgctggtgacctgcccaccgtccctgtccatgccccgcccttccagctgaggacaggctggcgcctccacccaccctcctgcctcacccctgcggagagcaccgtggcggggcgacagcgcatgcaggaacgggggtctcctctcctgcccgtcctggccggggtgcctctggggacgggcgacgctgctgtgtgtggtctcagaggctctgcttccttaggttacaaaacaaaacagggagagaaaaagcaaaaaaaaaaaaaaaaaaaaaaaaaaaa

SEQ ID NO: 377 - DNA, 1190 bp, Homo sapiens
ggcacgaggctgaggtgtatttcgggtcttgctggggctgagagagaccacagccctttggggggtacaaacaagagttcagttgctgtgaattctgccactgtgcccagctctgaagcctcagctcttgccaaacagacccgagacccatgtcagccccactggatgccgccctccacgcccttcaggaggagcaggccagactcaagatgaggctgtgggacctgcagcagctgagaaaggagctcggggactcccccaaagacaaggtcccattttcagtgcccaagatccccctggtattccgaggacacacccagcaggacccggaagtgcctaagtctttagtttccaatttgcggatccactgccctctgcttgcgggctctgctctgatcacctttgatgaccccaaagtggctgagcaggtgctgcaacaaaaggagcacacgatcaacatggaggagtgccggctgcgggtgcaggtccagcccttggagctgcccatggtcaccaccatccaggtgatggtgtccagccagttgagtggccggagggtgttggtcactggatttcctgccagcctcaggctgagtgaggaggagctgctggacaagctagagatcttctttggcaagactaggaacggaggtggcgatgtggacgttcgggagctactgccagggagtgtcatgctggggtttgctagggatggagtggctcagcgtctgtgccaaatcggccagttcacagtgccactgggtgggcagcaagtccctctgagagtctctccgtatgtgaatggggagatccagaaggctgagatcaggtcgcagccagttccccgctcggtactggtgctcaacattcctgatatcttggatggcccggagctgcatgacgtcctggagatccacttccagaagcccacccgcgggggcggggaggtagaggccctgacagtcgtaccccaaggacagcagggcctagcagtcttcacctctgagtcaggctaggggcctccccttctcatcctccccacccccccgccaaggttctcacactggcctgggcttgggtgcccatataggaggtctgtatgttcaccaacagtgcggaggggtcacacattgcaaaacactgcccagaacagtaaaaagagcctgcatgccaaaaaaaaaaaaaaaaaa

SEQ ID NO: 378 - DNA, 2001 bp, Homo sapiens
ggtgactggcccagccgcaccgcgtctcccgccttctccgcagccccgcaggccccgggccctgtcattcccagcgctgccctgtcttgcgttccagtgttccagcttctgcgagatgaccctcaaggcgagcgagggcgagagtgggggcagcatgcacacggcgctctccgacctctacctggagcatttgctgcagaagcgtagtcggccagaggctgtatcgcatccattgaatactgtgaccgaggacatgtacaccaacgggtctcctgccccaggtagccctgcccaggtcaagggacaggaggtgcggaaagtgcgactcatacagtttgagaaggtcacagaagagcccatgggaatcacgctgaagctgaatgaaaaacagtcctgtacggtggccagaattcttcatggtggcatgatccatagacaaggctcccttcacgtgggggatgagatcctagaaatcaatggcacaaatgtgacaaatcattcagtggatcagctgcagaaggcgatgaaagaaaccaaaggaatgatctcattaaaagtaattcccaaccagcaaagccgtcttcctgcactacagatgttcatgagagcgcagtttgactatgatcccaaaaaggacaatctgatcccttgcaaggaggcgggactgaagtttgctactggggacattatccagattatcaacaaggatgacagcaattggtggcagggacgggtggaaggctcctccaaggagtcagcaggattgatcccttcccctgagctgcaggaatggcgagtggcaagtatggctcagtcagctcctagcgaagccccgagctgcagtccctttgggaagaagaagaagtacaaagacaaatatctggccaagcacagctcgatttttgatcagttggatgttgtttcctacgaggaagtcgttcggctccctgcattcaagaggaagaccctggtgctgatcggagccagtggggtgggtcgcagccacattaagaatgccctgctcagccagaatccggagaagtttgtgtaccctgtcccatatacaacacggccgccaaggaagagtgaggaagatgggaaggagtaccactttatctcaacggaggagatgacgaggaacatctctgccaatgagttcttggagtttggcagctaccaaggcaacatgtttggcaccaaatttgaaacagtgcaccagatccataagcagaacaagattgccatccttgacattgagccccagaccctgaaaattgttcggacagcagaactttcgcctttcattgtgttcattgcacctactgaccagggcactcagacagaagccctgcagcagctgcagaaggactctgaggccatccgcagccagtacgctcactactttgacctctcactggtcaataatggtgttgatgaaacccttaagaaattacaagaagccttcgaccaagcgtgcagttctccacagtgggtgcctgtctcctgggtttactaagcttgtagaatgggggaacccactgtatgcccctctccagcatttggaattccacccgccttgctttaagacaaacagggctgctccaactagttttgtgtcagcttccagctctctgcagctatcctaattcagccagtaaggttcagtcttcttgctcaggctcctgaagggttgattctcctgatagatggggccccactgatctggatttgaaaaggatttctagaaattgggggtaagaagtactaccaaaatgtaactgctaatcaagggtgatgcacagcaaaagcaatggaccccatccctctaaagcctgccctcctttgccttcaactgtatatgctgggtatttcatttgtctttttattttggagaaagcgtttttaactgcaactttctataatgccaaaatgacacatctgtgcaatagaatgatgtctgctctagggaaaccttcaaaagcaataaaaatgctgtgttgg

SEQ ID NO: 379 - DNA, 2010 bp, Homo sapiens
caagaagtggcgaagttacctttgagggtatttgagtagcggcggtgtgtcaggggctaaagaggaggacgaagaaaagcagagcaagggaacccagggcaacaggagtagttcactccgcgagaggccgtccacgagacccccgcgcgcaggcatgagccccgccccccacgcatgagccccgccccccgctgttgcttggagaggggcgggacctggagagaggctgctccgtgaccccaccatgtcctctcctaccacgagttccctggatacccccctgcctggaaatggcccccctcagcctggcgccccttcttcttcacccactgtaaaggaggagggtccggagccgtggcccgggggtccggaccctgatgtcccaggcactgatgaggccagctcagcctgcagcacagactgggtcatcccagatcccgaagaggaaccagagcgcaagcgaaagaagggcccagccccgaagatgctgggccacgagctttgccgtgtctgtggggacaaggcctccggcttccactacaacgtgctcagctgcgaaggctgcaagggcttcttccggcgcagtgtggtccgtggtggggccaggcgctatgcctgccggggtggcggaacctgccagatggacgctttcatgcggcgcaagtgccagcagtgccggctgcgcaagtgcaaggaggcagggatgagggagcagtgcgtcctttctgaagaacagatccggaagaagaagattcggaaacagcagcagcaggagtcacagtcacagtcgcagtcacctgtggggccgcagggcagcagcagctcagcctctgggcctggggcttcccctggtggatctgaggcaggcagccagggctccggggaaggcgagggtgtccagctaacagcggctcaagaactaatgatccagcagttggtggcggcccaactgcagtgcaacaaacgctccttctccgaccagcccaaagtcacgccctggcccctgggcgcagacccccagtcccgagatgcccgccagcaacgctttgcccacttcacggagctggccatcatctcagtccaggagatcgtggacttcgctaagcaagtgcctggtttcctgcagctgggccgggaggaccagatcgccctcctgaaggcatccactatcgagatcatgctgctagagacagccaggcgctacaaccacgagacagagtgtatcaccttcttgaaggacttcacctacagcaaggacgacttccaccgtgcaggcctgcaggtggagttcatcaaccccatcttcgagttctcgcgggccatgcggcggctgggcctggacgacgctgagtacgccctgctcatcgccatcaacatcttctcggccgaccggcccaacgtgcaggagccgggccgcgtggaggcgttgcagcagccctacgtggaggcgctgctgtcctacacgcgcatcaagaggccgcaggaccagctgcgcttcccgcgcatgctcatgaagctggtgagcctgcgcacgctgagctctgtgcactcggagcaggtcttcgccttgcggctccaggacaagaagctgccgcctctgctgtcggagatctgggacgtccacgagtgaggggctggccacccagccccacagccttgcctgaccaccctccagcagatagacgccggcaccccttcctcttcctagggtggaaggggccctgggcgagcctgtagacctatcggctctcatcccttgggataagccccagtccaggtccaggaggctccctccctgcccagcgagtcttccagaaggggtgaaagggttgcaggtcccgaccactgacccttcccggctgccctccctccccagcttacacctcaagcccagcacgcagcgtaccttgaacagagggaggggaggacccatggctctccccccctagcccgggagaccaggggccttcctcttcctctgcttttatttaataaaaataaaaacagaaa

SEQ ID NO: 380 - DNA, 664 bp, Homo sapiens
ggattgttggtctgcgtggaacttctcaggtggacaccagagcatggaacacatccacgacagcgatggcagttccagcagcagccaccagagcctcaagagcacagccaaatgggcggcatccctggagaatctgctggaagacccagaaggcgtgaaaagatttagggaatttttaaaaaaggaattcagtgaagaaaatgttttgttttggctagcatgtgaagattttaagaaaatgcaagataagacgcagatgcaggaaaaggcaaaggagatctacatgacctttctgtccagcaaggcctcatcacaggtcaacgtggaggggcagtctcggctcaacgagaagatcctggaagaaccgcaccctctgatgttccagaaactccaggaccagatctttaatctcatgaagtacgacagctacagccgctttcttaagtctgacttgtttttaaaacacaagcgaaccgaggaagaggaagaagatttgcctgatgctcaaactgcagctaaaagagcttccagaatttataacacatgagcccccaaaaagccgggactggcagctttaagaagcaaaggaatttcctctcaggacgtgccgggtttatcattgctttgttatttgtaaggactgaaatgtacaaaacccttcaat

SEQ ID NO: 381 - DNA, 923 bp, Homo sapiens
gaacaggcttgctgcttcctcctcctcggcctcaccattccagaccaaaattgaaaaaatggttgacctcacccaggtaatggatgatgaagtattcatggcttttgcatcctatgcaacaattattctttcaaaaatgatgcttatgagtactgcaactgcattctatagattgacaagaaaggtttttgccaatccagaagactgtgtagcatttggcaaaggagaaaatgccaagaagtatcttcgaacagatgacagagtagaacgtgtacgcagagcccacctgaatgaccttgaaaatattattccatttcttggaattggcctcctgtattccttgagtggtcccgacccctctacagccatcctgcacttcagactatttgtcggagcacggatctaccacaccattgcatatttgacaccccttccccagccaaatagagctttgagtttttttgttggatatggagttactctttccatggcttacaggttgctgaaaagtaaattgtacctgtaaagaaaatcatacaactcagcatccagttggctttttaagaattctgtacttccaatttataatgaatactttcttagattttaggtaggaggggagcagaggaattatgaactggggtaaacccattttgaatattagcattgccaatatcctgtattcttgttttacatttggattagaaatttaacatagtaattcttaagtcttttgtctgatttttaaagtactttcttataaatttggatcatgttatgatttgtaacattcacacaacacctcacttttgaatctataaaagaattgcacgtatgagaaacctatatttcaatactgctgaaacagacatgaaataaagaatttaaagaatcaaaaaaaaaaaaaaaaaaaaaaaaaaaaa

SEQ ID NO: 382 - DNA, 1140 bp, Homo sapiens
  misc_feature (23)..(23): N may be C, G, T or A
ctggcgctgctggggctcggcgncggcctttgtctgcgggcacggccgctgcggtgctcaggaacagcccatggaagaatcatatgaagaggtggtgactgaggtcgtaagcaggagtggacatgtttggatttccaacagctaccctgctggactgtcatggaagatatgcccagaatgtagcgttcttcaatgtgatgactgaagcccaccacaaatatgaccactctgaggctacaggatcctcaagctgggatatccaaaattctttcagaagagagaagctggaacaaaaatccccagattcgaagacactacaggaagattcacctggagtgagacaaagggtctatgagtgccaggagtgtggaaaatccttccggcaaaaaggtagtctaacgttacatgagagaatccacactggtcaaaagccttttgagtgcacccactgtggaaaaagcttcagggccaaaggcaatcttgttacacatcaacggatacacacgggagagaagccttatcagtgcaaggagtgtgggaaaagcttcagtcaacgaggtagtctcgctgtccacgagagactccacactggacagaaaccctacgagtgtgctatttgtcagagaagcttcaggaatcagagtaaccttgctgttcacaggagagttcacagtggtgagaagccctatagatgtgatcagtgtggaaaagccttcagtcagaaaggaagcttaattgttcacatcagagtccacacaggcctgaagccctatgcctgtacccagtgcaggaagagtttccacaccagggggaattgtattctgcatggcaaaatccacacaggagagacaccctatctgtgcggccagtgtggaaaaagcttcacccagagagggagtctggctgtgcaccagcgaagctgctcacagaggctcaccctttgaccactttcctgaagagaagttctctttatgaattaagagtacaaaatcctctgagatgaagcaacctatccagttctatggaatgaatggagaatctttcagaaagaccatcattgggtagggcaaactgatttttttcctttcccccaaaagagtatgaaaaataaaggtcttgtttattatcattaaaaaaaaa

SEQ ID NO: 383 - DNA, 2580 bp, Homo sapiens
tcgggccccgcggccgcctttataaggcggcgggggtggtggcccgggccgcgttgcgctcccgccactccgcgcccgctatcctggctccgtgctcccacgcgcttgtgcctggacggaccctcgccagtgctctgcgcaggattggaacatcagttaacatctgaccactgccagcccaccccctcccacccacgtcgattgcatctctgggctccagggataaagcaggtcttggggtgcaccatgatttcaccattcttagtactggccattggcacctgccttactaactccttagtgccagagaaagagaaagaccccaagtactggcgagaccaagcgcaagagacactgaaatatgccctggagcttcagaagctcaacaccaacgtggctaagaatgtcatcatgttcctgggagatgggatgggtgtctccacagtgacggctgcccgcatcctcaagggtcagctccaccacaaccctggggaggagaccaggctggagatggacaagttccccttcgtggccctctccaagacgtacaacaccaatgcccaggtccctgacagcgccggcaccgccaccgcctacctgtgtggggtgaaggccaatgagggcaccgtgggggtaagcgcagccactgagcgttcccggtgcaacaccacccaggggaacgaggtcacctccatcctgcgctgggccaaggacgctgggaaatctgtgggcattgtgaccaccacgagagtgaaccatgccacccccagcgccgcctacgcccactcggctgaccgggactggtactcagacaacgagatgccccctgaggccttgagccagggctgtaaggacatcgcctaccagctcatgcataacatcagggacattgacgtgatcatggggggtggccggaaatacatgtaccccaagaataaaactgatgtggagtatgagagtgacgagaaagccaggggcacgaggctggacggcctggacctcgttgacacctggaagagcttcaaaccgagatacaagcactcccacttcatctggaaccgcacggaactcctgacccttgacccccacaatgtggactacctattgggtctcttcgagccaggggacatgcagtacgagctgaacaggaacaacgtgacggacccgtcactctccgagatggtggtggtggccatccagatcctgcggaagaaccccaaaggcttcttcttgctggtggaaggaggcagaattgaccacgggcaccatgaaggaaaagccaagcaggccctgcatgaggcggtggagatggaccgggccatcgggcaggcaggcagcttgacctcctcggaagacactctgaccgtggtcactgcggaccattcccacgtcttcacatttggtggatacaccccccgtggcaactctatctttggtctggcccccatgctgagtgacacagacaagaagcccttcactgccatcctgtatggcaatgggcctggctacaaggtggtgggcggtgaacgagagaatgtctccatggtggactatgctcacaacaactaccaggcgcagtctcctgtgcccctgcgccacgagacccacggcggggaggacgtggccgtcttctccaagggccccatggcgcacctgctgcacggcgtccacgagcagaactacgtcccccacgtgatggcgtatgcagcctgcatcggggccaacctcggccactgtgctcctgccagctcggcaggcagccttgctgcaggccccctgctgctcgctctggccctctaccccctgagcgtcctgttctgagggcccagggcccgggcacccacaagcccgtgacagatgccaacttcccacacggcagcccccccctcaaggggcagggaggtgggggcctcctcagcctctgcaactgcaagaaaggggacccaggaaaccaaagtctgccgcccacctcgctcccctctggaatcttccccaagggccaaacccacttctggcctccagcctttgctccctccccgctgccctttggccaccagggtagatttctcttgggcaggcagagagtacagactgcagacattctcaaagcctcttatttttctagcgaacgtatttctccagacccagaggccctgaagcctccgtggaacattgtggatctgaccctcccagtctcatctcctgaccctcccactcccatctccttacctctggaaccccccaggccctacaatgctcatgtccctgtccccaggcgagccctccttcaggggagttgaggtctttctcctcaggacaaggccttgctcactcactcactccaagaccaccagggtcccaggaagccggtgcctgggtggccatcctacccagcgtgcccaggccgggaagagccacctggcagggctcacactcctgggctctgaacacacacgccagctcctctctgaagcgactctcctgtttggaacggcaaaaaaaaatttttttttctctttttggtggtggttaaaagggaacacaaaacatttaaataaaactttccaaatatttccgagg

SEQ ID NO: 384 - DNA, 2159 bp, Homo sapiens
tctttccgtcccgggcagccagcgccagtcggagccagcgcgagcgccgccgccatcactgccgctgccaagtcctccacccgctgcccccgccatgtctgctaccgctgccacggccccccctgctgccccggctggggagggtggtccccctgcaccccctccaaacctcaccagtaacaggagactgcagcagacccaggcccaggtggatgaggtggtggacatcatgagggtgaacgtggacaaggtcctggagcgagaccagaagctgtcggagctggacgaccgtgcagatgcactccaggcgggggcctcccagtttgaaacaagcgcagccaagctcaagcgcaaatactggtggaaaaacctcaagatgatgatcatcttgggagtgatttgcgccatcatcctcatcatcatcatagtttacttcagctcttaaatccccgaggagtctgccctgcctagagaagggcctctcccccaaccctcagccgttcctccacctctcagccatatctttcagccccccctcccctggatccgtgtgtgtgtgtgtccgtgtgtgtgtccccctgtaaatagccagctgttatttatacatatataatattatatatatttggtctgtttgtagttttattactagatgatttttccggttgtccttaacaccccttcctgaggttcccttcacccctctctcttgccttccttccctttccctttcttcctgactagccccaagtcccttcatttgcatctgctatgcaatagtccctctcctttccttcttcttccctcagatttagctgatccttcctcccaccctggccttcctttcctctttcctcctcactctccccgtcatgctccctctgccccgccctcaaaaaaaaaaaaaaaaaaaaaaaaaaaaaaaaccaccagcacctgtccaggcttccttaggtacatcttctttgtatccattgggaggctctgagactggccccacttggtcctaaaaatcccaaggtctttgggagcgtccagcatgttaattagcgtatcattacatactgctatccctttccatttctttttgttccatcactcttctctcaacctgtgtttctttttttactgaggagttagtccccattagttcttgtatcacattttcatttgcacgacattactcgcaggtggtggggagcctgggcttttggggaaccaggctgctctggtccccagcattgcctcctcctagcccctctagtccagtttgcctcccttaccctcattttccaaacctcttgtaccctcctctccctcccccagtggtatgtaagtgtcttgaagttcagtatgttatgatggaccaataattctgcccttcgggtttctccctacattcctgctccccagttttcatgtggggtactcaactgacattcccatggggtttccctcccatctgcctgatccacctcctcctcccaccacaagatcaattgttggccacaattgatctcttgtagaggggtggctaccagtgtgtgtgtgggggtcatcactgccttggggaggagtggggcagggcagagaatccccccaattcctgcctgaaatctctggcctcacccctgctgggggttggactgaaaaccctcctccccaatttggggggtgttgccccatcactgcccagctcctctgactgccccccctgaatttagggtgggggtactagtcactgccaatgtgtgtatgggacttgctggaaaacggggatgcttgcccctctccaggactattgagcccagagagagctgtcctctcattgggtgaactgattgaggaagggtctattgtctttttaaatggcacaattttaagggtttgagggtacagtcccttaacctgccacgggagggggcccccaaactttcttcccccccacacttctggttttctgtgtggagggggagcagggatatctaagctgtggtgtgaaagggtaggagagatgctggaggtgggggtgctgtgttctagaccccccatattatcccagtgtcccctgcccccctcttcccccaccccatgcccccaattctgtggcgcatccagattgtgaaaatgtacaataaatgtgtaatgagtaaccaggt

SEQ ID NO: 385 - DNA, 1738 bp, Homo sapiens
cgggggggtactgtgcgagccctcaaggaggtggctgttctgtagctggagagctccgtgggtggcaggactgaacttgaacaccagaaacaacccccaagccttgtgacctgggaggcaggaggcgggtctgtctccctgggacttgggtggctgagccgaggtactcgggaccctgtcccgcgcatggcagagtggctcctcacagcctgaagctcatccttctgcacgggccagccaggccagcacagaggcaccagggcagcagtgcacacaggtccccggggaccccaccatgtggagcggatggtggctgtggccccttgtggccgtctgcactgcagacttctttcgggacgaggcagagaggatcatgagggactcccctgtcattgatgggcacaatgacctcccctggcagctgctggatatgttcaacaaccggctgcaggacgagagggccaacctgaccaccttggccggcacacacaccaacatccccaagctgagggccggctttgtgggaggccagttctggtccgtgtacacgccctgcgacacccagaacaaagacgccgtgcggaggacgctggagcagatggacgtggtccaccgcatgtgccggatgtacccggagaccttcctgtatgtcaccagcagtgcaggcattcggcaggccttccgggaagggaaggtggccagcctgatcggcgtggagggcggccactccattgacagcagtttgggcgtcctgcgggcactctatcagctgggcatgcggtacctgaccctcacccacagctgcaacacgccctgggctgacaactggctggtggacacgggagacagcgagccccagagccaaggcttgtcaccctttgggcagcgtgtggtgaaggagctgaaccgtctgggggtcctcatcgacttggctcacgtgtctgtggccaccatgaaggccaccctgcagctgtccagagccccggtcatcttcagccactcctcggcctacagcgtgtgcgcaagccggcgcaacgtgcctgacgacgtcctgaggctggtgaaacagacagacagcctggtgatggtgaacttctacaacaattacatttcctgcaccaacaaggccaacctgtcccaagtggccgaccatctggatcacatcaaggaggtggcaggagccagagccgtgggttttggtggggactttgatggtgttccaagggtccctgaggggctggaggacgtctccaagtatccagacctgatcgctgagctgctcaggaggaactggacggaggcggaggtcaagggcgcactggctgacaacctgctgagggtcttcgaggctgtggaacaggccagcaacctcacacaggctcccgaggaggagcccatcccgctggaccagctgggtggctcctgcaggacccattacggctactcctctggggcttccagcctccatcgccactgggggctcctgctggcctccctcgctcccctggtcctctgtctgtctctcctgtgaaacctgggagaccagagtcccctttagggttcccggagctccgggaagacccgcccatcccaggactccagatgccaggagccctgctgcccacatgcaaggaccagcatctcctgagaggacgcctgggcttacctggggggcaggatgcctggggacagttcaggacacacacacagtaggcccgcaataaaagcaacacccctt

SEQ ID NO: 386 - DNA, 1529 bp, Homo sapiens
ggctgctgtttctaaaacccctttccctctaacccacaccacctttctactcactgatgccttcaggaagccataatggatggcacagagattgctgtttcccctcggtcactgcattcagaactcatgtgccctatctgcctggacatgctgaagaatacgatgaccaccaaggagtgcctccacagattctgctctgactgcattgtcacagccctacggagcgggaacaaggagtgtcctacctgccgaaagaagctggtgtccaagcgatccctacggccagaccccaactttgatgccctgatctctaagatctatcctagccgggaggaatacgaggcccatcaagaccgagtgcttatccgcctgagccgcctgcacaaccagcaggcattgagctccagcattgaggaggggctacgcatgcaggccatgcacagggcccagcgtgtgaggcggccgataccagggtcagatcagaccacaacgatgagtgggggggaaggagagcccggggagggagaaggggatggagaagatgtgagctcagactccgcccctgactctgccccaggccctgctcccaagcgaccccgtggagggggcgcaggggggagcagtgtagggacagggggaggcggcactggtggggtgggtgggggtgccggttcggaagactctggtgaccggggagggactctgggagggggaacgctgggccccccaagccctcctggggcccccagccccccagagccaggtggagaaattgagctcgtgttccggccccaccccctgctcgtggagaagggagaatactgccagacgaggtatgtgaagacaactgggaatgccacagtggaccacctctccaagtacttggccctgcgcattgccctcgagcggaggcaacagcaggaagcaggggagccaggagggcctggagggggcgcctctgacaccggaggacctgatgggtgtggcggggagggtgggggtgccggaggaggtgacggtcctgaggagcctgctttgcccagcctggagggcgtcagtgaaaagcagtacaccatctacatcgcacctggaggcggggcgttcacgacgttgaatggctcgctgaccctggagctggtgaatgagaaattctggaaggtgtcccggccactggagctgtgctatgctcccaccaaggatccaaagtgaccccaccaggggacagccagaggaaggggaccatggggtatccctgtgtcctggtctatcaccccagcttctttgtcccccagtacccccagcccagccagccaataagaggacacaaatgaggacacgtggcttttatacaaagtatctatatgagattcttctatattgtacagagtggggcaaaacacgcccccatctgctgccttttctattgccctgcaacgtcccatctatacgaggtgttggagaaggtgaagaaccctcccattcacgcccgcctaccaacaacaaacgtgcttttttcctctttgaaaaaa

SEQ ID NO: 387 - DNA, 2353 bp, Homo sapiens
ggcacgagggacagctggaagagccgaacggataagagaagaggaggtgagaggagctgtacaccacaagaggcactgagggactcaggataacgggatgaagccgtcagtgcccccagaaacgaagcggccccggacgaatttctgagtcaccgtcgcgagaaagcgggctgagccgccattttgaagcctggcaaaccgaagcaagaaatgctgccgtgttggatctttgccagccttcgtgccgaatgggagcaggttggagggagggagagccaatatacactatgggctgattaagcccggttggctgccatgttgttaacgagcaccgatttcctctacttttgtcgaagaagtttattgtgggtcagggacgtcaggtcgcttgccttcgtttactgtggtcatgattgagcatatgaggacggccattattgttgggggcaaatggaaatgctctaggcggggccatttttcttaggggcaagctgtcgtcacccttgtcaactggttcggatgaagcccctgtggccgccatcttgatctcgggcggccccgataagggaggcggagtgtgcggagaggaggcggggcaactgcgcggacgtgacgcaaggcgccgccatgtcttttgagggcggtgacggcgccgggccggccatgctggctacgggcacggcgcggatggcgtcggggcgccccgaggagctgtgggaggccgtggtgggggccgctgagcgcttccgggcccggactggcacggagctggtgctgctgaccgcggccccgccgccaccaccccgcccgggcccctgtgcctatcctgcccatggtcgaggagccctggcggaggcagcgcgccgttgcctccacgacatcgcactggcccacagggctgccactgctgctcggcctcctgcgcccccaccagcaccacagccacccagtcccacacccagcccaccccggcctaccctggccagagaggacaacgaggaggacgaggatgagcccacagagacagagacctccggggagcagctgggcattagtgataatggagggctctttgtgatggatgaggacgccaccctccaggaccttccccccttctgtgagtcagaccccgagagtacagatgatggcagcctgagcgaggagacccccgccggcccccccacctgctcagtgcccccagcctcagccctacccacacagcagtacgccaagtccctgcctgtgtctgtgcccgtctggggcttcaaggagaagaggacagaggcgcggtcatcagatgaggagaatgggccgccctcttcgcccgacctggaccgcatcgcggcgagcatgcgcgcgctggtgctgcgagaggccgaggacacccaggtcttcggggacctgccacggccgcggcttaacaccagcgacttccagaagctgaagcggaaatattgaagtccagggagggagcgccccgggccgcgtccgccccgtcccacactacgcccccgccccactcccggggcctgctaatctgaggccgatccgggaccggcctccttgcgtctcccattcccaagattgtcccgcctctgccaatccccgccgtccttccagcccacgacctgccgcgccgaggagcggcatctgtcccgtttcccgattgggtctgtcgtctctctccgcctagcgacagattccttctattaagggattggctcgctgagttctaagctctaaatgggtcaactcctttgttttccgcctagcgacaagggatttgctcgcacggcattggctccatcccctagtcgctggacagctctttttttgattggctcaaatcctgtaaagggcttgaccagtctctacatagtcaccgtccgcttttcctgagttctccctcccaattggctccagcttcctgggggcgtggccaagccctcctcttcccagaattggcccggggccttcaatttacgttctttacactacggggactggggtcgtctttgcccacgtcccgacaacttgttccctgaccccctcagggatggccccaaactgtccctgcctctggcaccccctttcattggttccatccatccccacaacagcctgccaatcgaagcccgtccctgcatccaggatggtaccagctcccgcccctcgccccccacctccacaggtgccttaaagggccctcgtccacccaaggtggggggcaggggccctcactctccggccctggtgtgggggagagagtgaggggttgggggatcggcagttgggaggggcgctctgagattaaagagttttacctctgagataaaaaaaaaaaaaaaaaaaa

SEQ ID NO: 388 - DNA, 1519 bp, Homo sapiens
gcggcgcctcccgccgcgcccgggatgtattcgtccccgctctgcctcacccaggatgagttccacccgttcatcgaggccctgctgcctcacgtccgcgccttcgcctacacctggttcaacctgcaggcgcggaagcgcaagtacttcaagaagcacgagaagcggatgtcgaaggacgaggagcgtgcggtcaaggacgagctgctgggcgagaagcccgaggtcaagcagaagtgggcgtcgcggctgctggccaagctgcgcaaggacatccggcccgagtgccgcgaggacttcgtgctgagcatcaccggcaagaaggcgccgggctgcgtgctctccaaccccgaccagaagggcaagatgcggcgcatcgactgtctccggcaggcggacaaggtgtggcggctggacctggtcatggtcatcctgttcaagggcatcccgctggagagcaccgacggcgagcgcctggtcaaggctgcgcagtgcggtcacccggtcctgtgcgtgcagccgcaccacattggcgtggccgtcaaggagctggacctctacctggcctacttcgtgcgtgagcgagatgcagagcaaagcggcagtccccggacagggatgggctctgaccaggaggacagcaagcccatcacgctggtcacgaccgacttccaggagagctttgtcacctccggcgtgttcagcgtcactgagctcatccaagtgtcccggacacccgtggtgactggaacaggacccaacttctccctgggggagctgcaggggcacctggcatacgacctgaacccagccagcactggcctcagaagaacgctgcccagcacctcctccagtgggagcaagcggcacaaatcgggctcgatggaggaagacgtggacacgagccctggcggcgattactacacttcgcccagctcgcccacgagtagcagccgcaactggacggaggacatggaaggaggcatctcgtccccggtgaagaagacagagatggacaagtcaccattcaacagcccgtccccccaggactctccccgcctctccagcttcacccagcaccaccggcccgtcatcgccgtgcacagcgggatcgcccggagcccacacccgtcctccgctctgcatttccctacgacgtccatcctaccccagacggcctccacctacttcccccacacggccatccgctacccacctcatctcaacccccaggacccgctcaaagatcttgtctcgctggcctgcgacccagccagccagcaacctggaccgtcctggtatctgggatagcaaaggtcttcttccctcgccccttctccatcgtcccaggaatcccagggggcagcacagccggcccccggcccacgttttcggtggaaaattagagtgaacaagaacacccctgccgactcccagcccggccaaaaagacaaaacacatagacgcacacactcaggaggaaaagaaaaaacaaaggcagaagaaaaaaaaaaaaaaa

SEQ ID NO: 389 - DNA, 2556 bp, Homo sapiens
tcaatataccatacaaagttccatctggtcttgattaaaaattattttagttttctcaggaaaatgatacagagggagaattgcctagattatatgagagaaaaaaaaagtagagagaaacataatgttttcttagattattacagcagtgaactatttccacctggtaagaagggtgcacttgagaatggggttcaagtactctaggaacatagatgtaagttctggatgcacagtagttgttgcttagctgtaagctggaaatttcaaggcagaaacagcagataccacaactataactgggtctccttgttttttgttttatgtgtatacgtgagattatggggaaagacaaaagtaatgcatagagatttattttttaacattcaattcataagcagtgtttatacctctttgtacttacttgaaaagtgtatattatgtaaatttagtataaaaacacttggactaattcataccatgtggtaaaatttcacattcaaaagaaatacccttctgttattaaaaataaaaaaaaaaaggagccaggagggtggctcatgactgtaatcccagtgctctgggaagccaaggtggagggatcatttgaggccaggactacttgagaacagcctgggcaacatagctagatcccttctctacaaaaagtaaaaaaaaaaaaaaaaaaaaaaaaaatagctaggcagggtggcacatgactggctattaaggaggctcaggtggagggatctcttcagcccaggaatttaaggcttcagtgagctaagattgggccattgcactccagccagggcaacagaccaagacccagtctcaaaataaataaataaaaatgaaagaaagcagtgcactgaaaatcaatttaagtatttactggagttgtcttgaaggcccaatgggaaatgtcagtaagggcacatgagaaaacactttaagaacctattcttccaaagatctttccagtatcttatgacaacacagtaaattatacccactccaaatgcaaaagctgaaactactctgctttctcacttaactacacttttgactttcgaaatacatttctctcttcggatatgagctgcaaactccttatataaaggctccaactctgcagccctaattattctagttggcccaagaaaaatcctaattgttttatctaaggagacggaattttccaatactgtagaggcatgtgtgtgtgtttgctttaaggaagctgttttggtaataaaaagtcactgagggtcataaattcatgttaacacatccagtgtacatgaagtaggcaccgagttaaactatttgtctactatatagcatgtcatcttaaaagccttattttttcctcaaaatattaactttatttttctccctgtaaaatcaagacacagttaaaatgtagccttcctcattttctgggaatactttctaacaagatatgcttctttccaattggacttctaaatttctagcaattctaacagtgcataaaagaggcaaccccaaaagtgtagcaggtactgaataacagatttgcagccttgggtatccacattaaaatttgaaatctaagtgaattacttcaagctgatttcttaggtcaaggagagattatggtccttaaatgcctgataaggtcacatacacaatttcaagtgcattatagtaaatccatgtgacagctcctacagctactaacctgcttctgccctcacggtagcgtgcacaatcttcatcgcatgtcctgggtggtggtaggagcagtagaaaccccctgggtcatgtcagatttagaaaatataagcaatggctcatacacgaattttaagttgtaacctacatgtgataagttgctttatcttccaaatgtaataaaaaccagaagttactttgaaataaattgaaggattagcagtggtgactgaggaataaaaattataatttaaaattgtccttaaggctggaattcttaacttattgaccttatatcctacatattacaggactttgtaaatttaggctgatatggaaatgtatatttatatcaaatttaaatttttagaatgatggtgctactatattctaattgttaatttgataattgtaattgtaatttgttaatttgttctaataatattttcatgacattattcatttgctgcttggcttgatggcataacaagtatgggttatttaccctgaaaaggaaacagtatcacccttccagaatctctatttacagctacagaagatgcaacacacctgtttctggaccacttccagatcagatgtgatgcatgctttagatcatttactttgatctaggaattactgtctggcatttcgtggtgtagggtaggtgtctccagcactgtataggtgtctggaattgagataagaatcaatttcaatacaaaatacattttttgcttaaagcacgcaaggattctatgaattcaggtaaattcacagggtggaaaacaggaactaatgttatatattcctgtagttatcttcataatgaagcag

SEQ ID NO: 390 - DNA, 1890 bp, Homo sapiens
atgccccgctacggagcgtcactccgccagagctgccccaggtccggccgggagcagggacaagacgggaccgccggagcccccggactcctttggatgggcctggcgctggcgctggcgctggcgctggcgctggctctgtctgactctcgggttctctgggctccggcagaggctcaccctctttctccccaaggccatcctgccaggttacatcgcatagtgccccggctccgagatgtctttgggtgggggaacctcacctgcccaatctgcaaaggtctattcaccgccatcaacctcgggctgaagaaggaacccaatgtggctcgcgtgggctccgtggccatcaagctgtgcaatctgctgaagatagcaccacctgccgtgtgccaatccattgtccacctctttgaggatgacatggtggaggtgtggagacgctcagtgctgagcccatctgaggcctgtggcctgctcctgggctccacctgtgggcactgggacattttctcatcttggaacatctctttgcctactgtgccgaagccgccccccaaaccccctagccccccagccccaggtgcccctgtcagccgcatcctcttcctcactgacctgcactgggatcatgactacctggagggcacggaccctgactgtgcagacccactgtgctgccgccggggttctggcctgccgcccgcatcccggccaggtgccggatactggggcgaatacagcaagtgtgacctgcccctgaggaccctggagagcctgttgagtgggctgggcccagccggcccttttgatatggtgtactggacaggagacatccccgcacatgatgtctggcaccagactcgtcaggaccaactgcgggccctgaccaccgtcacagcacttgtgaggaagttcctggggccagtgccagtgtaccctgctgtgggtaaccatgaaagcacacctgtcaatagcttccctccccccttcattgagggcaaccactcctcccgctggctctatgaagcgatggccaaggcttgggagccctggctgcctgccgaagccctgcgcaccctcagaattggggggttctatgctctttccccataccccggtctccgcctcatctctctcaatatgaatttttgttcccgtgagaacttctggctcttgatcaactccacggatcccgcaggacagctccagtggctggtgggggagcttcaggctgctgaggatcgaggagacaaagtgcatataattggccacattcccccagggcactgtctgaagagctggagctggaattattaccgaattgtagccaggtatgagaacaccctggctgctcagttctttggccacactcatgtggatgaatttgaggtcttctatgatgaagagactctgagccggccgctggctgtagccttcctggcacccagtgcaactacctacatcggccttaatcctggttaccgtgtgtaccaaatagatggaaactactccgggagctctcacgtggtcctggaccatgagacctacatcctgaatctgacccaggcaaacataccgggagccataccgcactggcagcttctctacagggctcgagaaacctatgggctgcccaacacactgcctaccgcctggcacaacctggtatatcgcatgcggggcgacatgcaacttttccagaccttctggtttctctaccataagggccacccaccctcggagccctgtggcacgccctgccgtctggctactctttgtgcccagctctctgcccgtgctgacagccctgctctgtgccgccacctgatgccagatgggagcctcccagaggcccagagcctgtggccaaggccactgttttgctag

SEQ ID NO: 391 - DNA, 1496 bp, Homo sapiens
gggccggcggctgcggcggctggagcaggcgagcggcggcggccgatagcgagtgtcagggccggccggggcggcgcttctcggcctgtcgctggtcggcctcctactgtacctcgtgcctgctgcggctgcgctggcctggctggccgtggggactaccgcggcctggtggggactgagccgcgagccccgaggttcgcgccccttgtcctccttcgttcagaaggcgcgacatcggcgaacactgttcgcttcgcctccggccaagtcgacagccaacggaaacctcctagagccgcggaccctgctcgaaggacctgaccctgccgaactgctcctcatgggcagttacctgggcaagcccgggccgccgcagcccgcccccgctccggagggccaggacctgcggaataggcctggccgccgcccgcccgcccggcgccgcgctccacaccgccctccccgccgacccatcgcgttcaccacttttacccctctctccccactcctcttctccgaccctccgggaggccttccccacgggatcgtgggactttaccagatcggtttgtaataacacctcgaagacgctatccgatccatcaggcccagtattcctgtccgggggtacttcccacagtgtgctggaatggttatcacaagaaggctgtgctgtcccctcgcaactccaggatggtgtgtagcccagtgactgtgaggatcgcccctcctgacagaagattttcgcgttctgcgataccagagcagataatcagctcaacactgtcctcaccatcaagtaatgccccagacccatgtgcaaaggagactgtactgagtgccctcaaagagaagaagaagaaaaggacagtggaggaagaagaccaaatattccttgatggccaggaaaataaaagaagctgtcttgtcgacggtctcactgatgcctcttctgcattcaaagttcctcgacccgggccagatacactccagttcacagtggatgtcttccactttgctaatgactccagaaacatgatatacatcacctgccacctgaaggtcaccctagctgagcaggacccagatgaactcaacaaggcctgttccttcagcaagccttccaacagctggttcccagtggaaggcccggctgacatctgtcaatgctgtaacaaaggtgactgtggcactccaagccattccaggaggcagcctcgtgtcgtgagccagtggtccacgtctgcttcccgtaaccgcaggcatgtgacagaagaagcagatgtcaccgtgggggccactgatcttcctggacaggagtggtgaccatgaagtagagcagtgggctttgccttctgacacctcagtggtgctgctgggcgtaggcctggctgtggtggtgtccctgactctgactgctgttatcctggttctcaccaggaggtgtcgcactgcctcccaccctgtgtctgcttccgaataaaagaagaaagcaa

SEQ ID NO: 392 - DNA, 2871 bp, Homo sapiens
atggagacgcaggaacttcggggggccctggctcttctcctcctttgctttttcacatctgccagtcaggatctgcaggtaattgacctgctgactgtgggcgagtctcggcagatggtagctgtggcagagaagatccggacagccttgctcactgctggggacatctacctcttatccaccttccgcctgccccccaagcagggtggtgtcctctttggcctctattctcgccaagacaacactcgatggctggaggcctctgttgtaggcaagatcaacaaagtactggtgcgataccagcgggaggatggcaaagtccacgccgtgaacctacagcaagcgggcctggctgatgggcgcacacacacagttctcctgcgactccgaggtccctccagacccagccctgccctacatctctacgtggactgcaaactgggtgaccaacatgcaggccttccagcactggcccccattcctccagcggaggtcgatgggctggagattaggactggacagaaggcgtatttgaggatgcagggctttgtggaatctatgaaaattattctgggtgggtccatggcccgggtaggagccctgagtgagtgtccattccaaggggacgagtccatccacagtgcagtgaccaatgcactgcactccattctaggggagcagaccaaggcgctggtcacccaactcaccctcttcaaccagatcctggtggagctgcgggatgatatacgagaccaggtaaaggaaatgtccctgatccgaaacaccattatggagtgtcaggtgtgcggcttccatgagcagcgttcccactgcagccccaatccctgcttccgaggtgtggactgcatggaagtgtacgagtacccaggctaccgctgtgggccctgcccccctggcctgcagggcaacggcacccactgcagtgacatcaatgagtgtgctcacgctgacccctgtttcccgggctccagctgcatcaacaccatgcccggcttccactgtgaggcctgtcctcgagggtacaagggcacacaggtgtctggtgtgggcattgactatgcccgggccagcaaacaggtctgcaatgacatcgatgaatgcaacgatggcaacaatggtggctgtgacccaaactccatctgcaccaacactgtgggctctttcaagtgtggtccctgccgcctgggtttcctgggcaaccagagccagggctgcctcccagcccggacctgccacagcccagcccacagcccctgccacatccatgctcactgtctctttgaacgcaatggtgcagtgtcctgccagtgtaacgtgggctgggctgggaatgggaacgtgtgtgggactgacacagacatcgatggctacccagaccaagcactgccctgcatggacaacaacaaacactgcaaacaggacaactgccttttgacacccaactctgggcaggaagatgctgataatgatggtgtgggggaccagtgtgatgatgatgctgatggggatgggatcaagaatgttgaggacaactgccggctgttccccaacaaagaccagcagaactcagatacagattcatttggtgatgcctgtgacaattgccccaacgttcccaacaatgaccagaaggacacagatggcaatggggaaggagatgcctgtgacaacgacgtggatggggatggcatccccaatggattggacaattgccctaaagtccccaacccactacagacagacagggatgaggacggggtgggagatgcttgcgacagctgccctgaaatgagcaatcctacccagacagatgcagacagcgacctggtgggggatgtctgtgatactaatgaagacagcgatggggatgggcatcaggacaccaaggacaactgcccacagctgccaaatagctcccagctggactctgataacgatggacttggagatgagtgtgatggggatgatgacaatgatggcatcccagattatgtgcctcctggtcccgataactgccgcctggtacccaatcccaatcagaaggactcagatggcaatggcgttggtgatgtgtgtgaggatgactttgacaatgatgctgtggtcgaccccctggatgtgtgtcctgaaagtgcagaggtaacgcttacggattttcgggcctatcagaccgtcgtcctggatcctgagggtgatgctcagattgacccaaactgggttgtgctcaaccagggcatggaaatcgttcagaccatgaacagtgaccctggcttggcagttggatacacggccttcaatggtgtggactttgaaggcaccttccatgtgaacacagtgactgatgatgactacgcaggctttctcttcagttatcaagacagtggccgcttctacgtagtcatgtggaagcagaccgagcagacctactggcaggctacacccttccgggcggttgcccagcccgggctgcagctcaaggcagtgacatcagtgtctggcccaggtgagcacctccgaaatgccctgtggcatactggccacacccctgatcaggtacgactcctgtggacagacccacgaaatgtgggctggcgggacaagacctcctatcgctggcagcttctgcaccggcctcaagttggctacattcgggtgaagctctatgagggaccccagcttgtggcggattctggggtgatcattgacacatccatgcgaggggggcgtcttggtgtattctgcttctcccaagaaaacataatttggtccaatctccagtatcgatgcaatgacacagtgcctgaggactttgagccattccggaggcagctgctccagggaagggtgtga

SEQ ID NO: 393 - DNA, 2010 bp, Homo sapiens
cgagaagacccggatagttcctcccggccacgccgcgccggctctgggcactcagcatcgtttccttttcctccgctggagcagctatggcggcggtgaagaccctgaaccccaaggccgaggtggcccgagcgcaggcggcgctggcggtcaacatcagcgcagcgcggggtctgcaggacgtgctaaggaccaacctggggcccaagggcaccatgaagatgctcgtttctggcgctggagacatcaaacttactaaagacggcaatgtgctgcttcacgaaatgcaaattcaacacccaacagcttccttaatagcaaaggtagcaacagcccaggatgatataactggtgatggtacgacttctaatgtcctaatcattggagagctgctgaaacaggcggatctctacatttctgaaggccttcatcctagaataatcactgaaggatttgaagctgcaaaggaaaaggcccttcagtttttggaagaagtcaaagtaagcagagagatggacagggaaacacttatagatgtggccagaacatctcttcgtactaaagttcatgctgaacttgcagatgtcttaacagaggctgtagtggactccattttggccattaaaaagcaagatgaacctattgatctcttcatgattgagatcatggagatgaaacataaatctgaaactgatacaagcttaatcagagggcttgttttggaccacggagcacggcatcctgatatgaagaaaagggtggaggatgcatacatcctcacttgtaacgtgtcattagagtatgagaaaacagaagtgaattctggctttttttacaagagtgcagaagagagagaaaaactcgtgaaagctgaaagaaaattcattgaagatagggttaaaaaaataatagaactgaaaaggaaagtctgtggcgattcagataaaggatttgttgttattaatcaaaagggaattgaccccttttccttagatgctctttcaaaagaaggcatagtcgctctgcgcagagctaaaaggagaaatatggagaggctgactcttgcttgtggtggggtagccctgaattcttttgacgacctaagtcctgactgcttgggacatgcaggacttgtatatgagtatacattgggagaagagaagtttacctttattgagaaatgtaacaaccctcgttctgtcacattattgatcaaaggaccaaataagcacacactcactcagatcaaagatgcagtgagggacggcttgagggctgtcaaaaatgctattgatgatggctgtgtggttccaggtgctggtgccgtggaagtggcaatggcagaagccctgattaaacataagcccagtgtaaagggcagggcacagcttggagtccaagcatttgctgatgcattgctcattattcccaaggttcttgctcagaactctggttttgaccttcaggaaacattagttaaaattcaagcagaacattcagaatcaggtcagcttgtgggtgtggacctgaacacaggtgagccaatggtggcagcagaagtaggcgtatgggataactattgtgtaaagaaacagcttcttcactcctgcactgtgattgccaccaacattctcttggttgatgagatcatgcgagctggaatgtcttctctgaaaggttgaattgaagcttcctctgtatctgaatcttgaagactgcaaagtgatcctgaggattacagctgtggaatttttgtccaagcttcaaataattttgaaagaaattttcccatatgaaaaaaggagagaacactggcatctgttgaaatttggaagttctgaaattatagtatttttaaaaattgcactgaagtgtatacacataaagcaggtcttttatccagtgaacaggatgttttgctttagcagcagtgacataaaattccatgttagataagcatatgttacttaccttgttattaaatatttcttgaaaagcaggccacgaagg

SEQ ID NO: 394 - DNA, 2332 bp, Homo sapiens
atttcccagacggggtggttgccggacggaggggctcctcacttctcagacggggcggttgccaggcagagggtttcctcacttctcagacggagcggccgggcagagacgctccccacctcccagacagggctgcggcccagcagaggcgctcctcacatcccggacagggcggcggggcagaggtgctccccacatctcagacgatgggcggccgggcagagacgctcctcacttcctagatgggatggcggcggggaagaggcgctcctcgcttcccagatgggatggcggccgggcagagacgctcctcactttccagactgggcagccaggcagaggggctcctcacatcccagacgatgggtggccaagcagagacgctcctcacttcccagacggggtggctgctgggcagaggctgcaatctcggctctccgggaggccatgtgtcttgggacaaggtgcgcattcctggtgtgctgcagcgattgggagtgacatactttgtggttgctgtgttggagctcctctttgctaaacctgtgcctgaacattgtgcctcggagaggagctgcctttctcttcgagacatcacgtccagctggccccagtggctgctcatcctggtgctggaaggcctgtggctgggcttgacattcctcctgccagtccctgggtgccctactggttatcttggtcctgggggcattggagattttggcaagtatccaaattgcactggaggagctgcaggctacatcgaccgcctgctgctgggagacgatcacctttaccagcacccatcttctgctgtactttaccacaccgaggtggcctatgaccccgagggcatcctgggcaccatcaactccatcgtgatggcctttttaggagttcaggcaggaaaaatactattgtattacaaggctcggaccaaagacatcctgattcgattcactgcttggtgttgtattcttgggctcatttctgttgctctgacgaaggtttctgaaaatgaaggctttattccagtaaacaaaaatctctggtccctttcgtatgtcactacgctcagttcttttgccttcttcatcctgctggtcctgtacccagttgtggatgtgaaggggctgtggacaggaaccccattcttttatccaggaatgaattccattctggtatacgtcggccacgaggtgtttgagaactacttcccctttcagtggaagctgaaggacaaccagtcccacaaggagcacctgactcagaacatcgtcgccactgccctctgggtgctcattgcctacatcctctatagaaagaagattttttggaaaatctgatggctcccactgagatgtgctgctggaagactctagtaggcctgcagggaggactgaagcagcctttgttaaagggaagcattcattaggaaattgactggctgcgtgtttacagactctgggggaagacactgatgtcctcaaactggttaactgtgacacggctcgccagaactctgcctgtctatttgtgacttacagatttgaaatgtaattgtcttttttcctccatcttctgtggaaatggatgtctttggaacttcattccgaggagataagctttaactttccaaaagggaattgccatgggtgtttttcttctgtggtgagtgaaacaatctgaggtctggttcttgctgaccttgttgccctgcaaacttcctttccacgtgtacgcgcacaccaacacgaaatgccatcactcctactgcggctgctatgaagcttactggttgtgatgtgttataatttagtctgtttttttgattgaatgcagtttaatgtttccagaaagccaaagtaattttcttttcagatatgcaaggctttggtgggtccaaaaaatgtctatcacaagccattttttccttttcctctctcgaaaagttaaaatatctatgtgttattcccaaaccctcttacctatgtatctgcctgtctgtccatcatcttccttcctccctatctctgtgtatctggatggcagccgctgcccaggggagtggctgtggggagggcaggtactgtctttgcctgtgggtccagctgagccatccctgctgggtgatgctgggcaagacccttggcccgtctgggccttggcttcctcacttgtgaaatgagcgggaagatgactctcagttccttccacctcttagacatggtgaggtaacagacatcaaaagcttttctgaaatcttcagaagaaatagttccattacagaaaactcttcaaaataaatagtagtgaaaacttttaaaaactc

SEQ ID NO: 395 - DNA, 841 bp, Homo sapiens
acccctcgtggcggtcccgcccgtccccgcgcaggcgcgctcgggctgccgctggctcttcgcacgcggccatggccgactccgagctgcagctggttgagcagcggatccgcagcttccccgacttccccaccccaggcgtggtattcagggacatctcgcccgtcctgaaggaccccgcctccttccgcgccgccatcggcctcctggcgcgacacctgaaggcgacccacgggggccgcatcgactacatcgcaggcctagactcccgaggcttcctctttggcccctccctggcccaggagcttggactgggctgcgtgctcatccgaaagcgggggaagctgccaggccccactctgtgggcctcctattccctggagtacgggaaggctgagctggagattcagaaagacgccctggagccaggacagagggtggtcgtcgtggatgatctgctggccactggtggaaccatgaacgctgcctgtgagctgctgggccgcctgcaggctgaggtcctggagtgcgtgagcctggtggagctgacctcgcttaagggcagggagaagctggcacctgtacccttcttctctctcctgcagtatgagtgaccacagggcctcccagcccaacatctccagctggatcccagggaaatatcagccttgggcaactgcagtgaccaggggcaccggctgcccacagggaacacattcctttgctggggttcagcgcctctcctggggctggaagtgccaaagcctggggcaaagctgtgtttcagccacactgaacccaattacacacagcgggagaacgcagtaaacagctttcccac

SEQ ID NO: 396 - DNA, 2466 bp, Homo sapiens
atgccgaccgtcattagcgcatctgtggctccaaggacagcggctgagccccggtccccagggccagttcctcacccggcccagagcaaggccactgaggctgggggtggaaacccaagtggcatctattcagccatcatcagccgcaattttcctattatcggagtgaaagagaagacattcgagcaacttcacaagaaatgtctagaaaagaaagttctttatgtggaccctgagttcccaccggatgagacctctctcttttatagccagaagttccccatccagttcgtctggaagagacctccggaaatttgcgagaatccccgatttatcattgatggagccaacagaactgacatctgtcaaggagagctaggggactgctggtttctcgcagccattgcctgcctgaccctgaaccagcaccttcttttccgagtcataccccatgatcaaagtttcatcgaaaactacgcagggatcttccacttccagttctggcgctatggagagtgggtggacgtggttatagatgactgcctgccaacgtacaacaatcaactggttttcaccaagtccaaccaccgcaatgagttctggagtgctctgctggagaaggcttatgctaagctccatggttcctacgaagctctgaaaggtgggaacaccacagaggccatggaggacttcacaggaggggtggcagagttttttgagatcagggatgctcctagtgacatgtacaagatcatgaagaaagccatcgagagaggctccctcatgggctgctccattgatgatggcacgaacatgacctatggaacctctccttctggtctgaacatgggggagttgattgcacggatggtaaggaatatggataactcactgctccaggactcagacctcgaccccagaggctcagatgaaagaccgacccggacaatcattccggttcagtatgagacaagaatggcctgcgggctggtcagaggtcacgcctactctgtcacggggctggatgaggtcccgttcaaaggtgagaaagtgaagctggtgcggctgcggaatccgtggggccaggtggagtggaacggttcttggagtgatagatggaaggactggagctttgtggacaaagatgagaaggcccgtctgcagcaccaggtcactgaggatggagagttctggatgtcctatgaggatttcatctaccatttcacaaagttggagatctgcaacctcacggccgatgctctgcagtctgacaagcttcagacctggacagtgtctgtgaacgagggccgctgggtacggggttgctctgccggaggctgccgcaacttcccagatactttctggaccaaccctcagtaccgtctgaagctcctggaggaggacgatgaccctgatgactcggaggtgatttgcagcttcctggtggccctgatgcagaagaaccggcggaaggaccggaagctaggggccagtctcttcaccattggcttcgccatctacgaggttcccaaagagatgcacgggaacaagcagcacctgcagaaggacttcttcctgtacaacgcctccaaggccaggagcaaaacctacatcaacatgcgggaggtgtcccagcgcttccgcctgcctcccagcgagtacgtcatcgtgccctccacctacgagccccaccaggagggggaattcatcctccgggtcttctctgaaaagaggaacctctctgaggaagttgaaaataccatctccgtggatcggccagtgaaaaagaaaaaaaccaagcccatcatcttcgtttcggacagagcaaacagcaacaaggagctgggtgtggaccaggagtcagaggagggcaaaggcaaaacaagccctgataagcaaaagcagtccccacagccacagcctggcagctctgatcaggaaagtgaggaacagcaacaattccggaacattttcaagcagatagcaggagatgacatggagatctgtgcagatgagctcaagaaggtccttaacacagtcgtgaacaaacacaaggacctgaagacacacgggttcacactggagtcctgccgtagcatgattgcgctcatggatacagatggctctggaaagctcaacctgcaggagttccaccacctctggaacaagattaaggcctggcagaaaattttcaaacactatgacacagaccagtccggcaccatcaacagctacgagatgcgaaatgcagtcaacgacgcaggattccacctcaacaaccagctctatgacatcattaccatgcggtacgcagacaaacacatgaacatcgactttgacagtttcatctgctgcttcgttaggctggagggcatgttcagagcttttcatgcatttgacaaggatggagatggtatcatcaagctcaacgttctggagtggctgcagctcaccatgtatgcctga

SEQ ID NO: 397 - DNA, 3008 bp, Homo sapiens
atctaccccaaatttctgaacaaaattaatattcagtattatatctagcctatagattctcttactcttggtgtaatgacagcattcccagtttaggaaactgttttaaaatcttgtgtcttggttgtggctgaggctttgggaaggccagagccccctttgccaccacccctagggtgtcagctccaagcctgggcctgagggtttgatggggagcgggtgagctggatcctgatcccagtggtcagtggccagatcctgggctgctggccagaaccctggctttgtgagtggctgcagcttggctctgctccagcccacaggggctaaaggggcgggtagggagtgtgtagggagcgtgtacgtggctttgtgtccttggctcctccagactctcacatgtgcgggcaccatatacttctgctgcccttgtgccccaatcattgcacaaacagaaacagctctgacagagaagggactgctagagttaggaaccctagggcctggaaggaaggtatggctctcagagtgacctggggtctattcagtcccctctggacctgtttccctggcaacgctgtgggaacaacagtctatgcaacacaggagacctgatgccactggtgtcctccaaattttaaggcgaaggcaggcattgtgaatgatgcagggatggccagaatggtttttgccttcgttctttccccaggggaaccaagcctgtgggtggggaaatcacactaaggctggacagtgactgaatctggcccaggagaaacttggctgcctgccttccagaccagggtttttcttccctgagatcctggaggggaagtacctggaacttgggagtgttgccctggtctggaagatctgatagacatagtatgcacacatttccctcgagcttcccatgactggggagtagatgagaaccctgagtgggtggctggtttcttgaggcatacatatacccgacacaccttacacctctgatttggctgcattttggaatcatctgggaagttttaaacaatactggtgcctaggtccaacctccagagactctgatttaattggtatggggtggggttttgcagttttcaaaccacaatatccagcaaagtttgagaaccactgccctacacagccctccttcttctttatcttatctggagtcaggggcaccttcagcttctccaatcacctggccagtggctcttgtttccagtcctgctgttccagggtggataggccttcaggcggagacccaggaatccagctccagactctgtcccaagcagcctcttcagtccgggacgggacaggaagtgtccggcggaggtgggggtggagatgagcagcagctgctcagggctgagcagggtcctggtggccgtggctacagccctggtgtctgcctcctccccctgcccccaggcctggggccccccaggggtccagtatgggcagccaggcaggtccgtgaagctgtgttgtcctggagtgactgccggggacccagtgtcctggtttcgggatggggagccaaagctgctccagggacctgactctgggctagggcatgaactggtcctggcccaggcagacagcactgatgagggcacctacatctgccagaccctggatggtgcacttgggggcacagtgaccctgcagctgggctaccctccagcccgccctgttgtctcctgccaagcagccgactatgagaacttctcttgcacttggagtcccagccagatcagcggtttacccacccgctacctcacctcctacaggaagaagacagtcctaggagctgatagccagaggaggagtccatccacagggccctggccatgcccacaggatcccctaggggctgcccgctgtgttgtccacggggctgagttctggagccagtaccggattaatgtgactgaggtgaacccactgggtgccagcacacgcctgctggatgtgagcttgcagagcatcttgcgccctgacccaccccagggcctgcgggtagagtcagtaccaggttacccccgacgcctgcgagccagctggacataccctgcctcctggccgtgccagccccacttcctgctcaagttccgtttgcagtaccgtccggcgcagcatccagcctggtccacggtggagccagctggactggaggaggtgatcacagatgctgtggctgggctgccccatgctgtacgagtcagtgcccgggactttctagatgctggcacctggagcacctggagcccggaggcctggggaactccgagcactgggaccataccaaaggagataccagcatggggccagctacacacgcagccagaggtggagcctcaggtggacagccctgctcctccaaggccctccctccaaccacaccctcggctacttgatcacagggactctgtggagcaggtagctgtgctggcgtctttgggaatcctttctttcctgggactggtggctggggccctggcactggggctctggctgaggctgagacggggtgggaaggatggatccccaaagcctgggttcttggcctcagtgattccagtggacaggcgtccaggagctccaaacctgtagaggacccaggagggcttcggcagattccacctataattctgtcttgctggtgtggatagaaaccaggcaggacagtagatccctatggttggatctcagctggaagttctgtttggagcccatttctgtgagaccctgtatttcaaatttgcagctgaaaggtgcttgtacctctgatttcaccccagagttggagttctgctcaaggaacgtgtgtaatgtgtacatctgtgtccatgtgtgaccatgtgtctgtgaggcagggaacatgtattctctgcatgcatgtatgtaggtgcctggggagtgtgtgtgggtccttggctcttggcctttccccttgcaggggttgtgcaggtgtgaataaagagaataaggaagtt

SEQ ID NO: 398 - DNA, 2037 bp, Homo sapiens
cattgaatcggccctaacgattctcggatcgtcattaggtgtaaccatagagcatgaattacctcttgaggtcatcagcgagaatttacgactgtcaacaaaagcacgtgattccctaacgccccccacccccccaaccccccccccatatttggccgcatacatagcaaaacgaagtacagtgcatcgctataattcattaatacatcataaatcgtgaagcacagggttataacgaccacgatccacaaatcaagccctccaaaatcacccaaatgagctcgtactttgtaaactccttctcggggcgttatccaaatggcccggactatcagttgctaaattatggcagtggcagctctctgagcggctcttacagggatcccgctgccatgcacaccggctcttacggctacaattacaatgggatggacctcagcgtcaaccgctcctcggcctcctccagccactttggggcggtgggcgagagctcgcgcgccttccccgcgcccgcccaggagccccgcttcaggcaagcggcttcgagctgctccctgtcctcgcccgagtccctgccctgcaccaacggcgacagccacggcgccaagccctctgcttcgtccccctccgaccaggcgacctcagccagctccagcgccaatttcaccgaaatagacgaggccagcgcgtcctcggagcctgaggaagcggcaagccagctaagcagccccagcctagctcgggcgcagccagagcccatggccacctccacagccgcccccgaggggcagactccgcagatattcccctggatgaggaagcttcacatcagccatgatatgaccgggccggacgggaaaagggcccggaccgcgtatacccgctaccagaccctggagctggaaaaggagttccacttcaaccgctacctgacccggcgacggcgcatcgagatcgcccacgcactctgcctgtccgagcgccagatcaagatctggttccagaaccggcgcatgaagtggaagaaggacaacaaattgaaaagtatgagcctggctacagctggcagcgccttccagccttgagcccgcccagaggagcccagcggcccaagagcccgtgccacccccagccctggcccctccaatcctccccgctctgccgccgcccgctggggaccggttcccacaagcctgcctcgccttgtgttacgatatttcgtttggtcttaggtcttcctgtggctccctctctcctggactggttatcttgttattattgttaataataataattattattattttccttccatgctcccaactcccttctgcttgtcccaaatccgccagtgtttctgaatgtttgtgtctgtggttgcagtctttcccccaggaaaaaaaaaaaaaaagaaattcgcatgtttaatgtgaactctcccctccccatctgtgttctaacttatttataaaagatgatcgctgtattttgagtttcagctggaaacttctgtaaggggcagcagttgaggtggggtagtgccgcagtggggtcaagctgagctggcttcggagatggagtcccttttcattctcctcctcctccctcctcactccctaggcccaagtctcctaggggcttggtcctagggtgggaaggggctagggaggaccaaagggatggtattgagaagagagaaagaagatagtgagatttaagttcctgctgcctgggtaggccccacaaggcctggtctgggagtatacggaaacaaaaatgatcctcagtgcaaaatgtcttgtgtatttctctgtgaatccatgggtctggctagagggcccaaagcttgtaaatatggggatagtctgggtcagacccatctctcccttacccatcttgcttccaagaccatttgtagtgagcgagtggatgctgtgctacgtgtgaaatctgtctttgcggggcctgtctcagtgattcgcttttggtatttgtttgtagctttcctggaagtcaaataaatgtttcccccactcc

SEQ ID NO: 399 - DNA, 2661 bp, Homo sapiens
ccggcaccgacatggcggccgtcttcgctgtggtgactttaactctcggttttcggttctagccggccggcgctcacttgtcttcaggaagctcggagcctttggtggagccggggagaggaagggtgggtgcaagagtgaaaggcgagaggggactgcaagcatccgggtcgctgctggccggagcagatggctgagggcgagcggcagccgccgccagattcttcagaggaggcccctccagccactcagaacttcatcattccaaaaaaggagatccacacagttccagacatgggcaaatggaagcgttctcaggcatacgctgactacatcggattcatccttaccctcaacgaaggtgtgaaggggaagaagctgaccttcgagtacagagtctccgaggccattgagaaactactcgctcttctcaacacgctggacaggtggattgatgagactcctccagtggaccagccctctcggtttgggaataaggcatacaggacctggtatgccaaacttgatgaggaagcagaaaacttggtggccacagtggtccctacccatctggcagctgctgtgcctgaggtggctgtttacctaaaggagtcagtggggaactccacgcgcattgactacggcacagggcatgaggcagccttcgctgctttcctctgctgtctctgcaagattggggtgctccgggtggatgaccaaatagctattgtcttcaaggtgttcaatcggtaccttgaggttatgcggaaactccagaaaacatacaggatggagccagccggcagccagggagtgtggggtctggatgacttccagtttctgcccttcatctggggcagttcgcagctgatagaccacccatacctggagcccagacactttgtggatgagaaggccgtgaatgagaaccacaaggactacatgttcctggagtgtatcctgtttattaccgagatgaagactggcccatttgcagagcactccaaccagctgtggaacatcagcgccgtgccttcctggtccaaagtgaaccagggtctcatccgcatgtataaggccgagtgcctggagaagttccctgtgatccagcacttcaagttcgggagcctgctgcccatccatcctgtcacgtcgggctaggagggccaagccgaagagccacccaggccacagttcctgtgcctgccttccccaccccagcagtggcccctcccccatcccctccctctgttcgtcccgtttgatgagaggctgtttactggggtggggtggcgagatgggcttgagggggctcagagcataaggcttcagggcccaagttgggagaagtgaccaaagtgtagccagttttctgagttcccgtgtgctagactggccagaagagagggtctggggcctggtcactcggccactctctcctgtttctggcctcttctcccttcactcccggtccagtctggttttgagagcaggggctgttctgcagcacctcagggaagggaggagagatacctgctgcttccattgcttttcccttcctggagtcgatgcctttctaagggttggagctgctccttgcaggggcgggtcagtttcccaggccatgccggggtggccatctatgctagggctggaagctgagctggccgccagctgtgggctggggtggggtgggtggggtcgggtggtggagaggccttagctgtcctgctggtgcccctcccaggctccttttcaccctgccccctgcctgaggccccctgtgtccaagcctccccctggctcttcagttctctagcccttggctttgctgggtttcctgactgtagccacatctctcccgctccctaagggtaacctagccaatggaagctggcctttgggtaggtgctgggctcctgggagggcccagatgatgggtgaggcatgtctttccagaactttcctggcagggaggggatggcagaaactcagggaggcttggggcccattgtatctggagagcctggattcctcttggcagtcttagcccagccacttctgctacctttgcgctgctgtgagcctcaccctgcccctgggccctgcttctctgctcccctgggtgatgggtgggcccagaaggtggcagtcccacaccttgtcctcccacctccctgaactgtccattgcttttatagggtgaggtaagtgacagcctcccaagcccaggctttggcactcagaatgggcccagtgggggctgggcagcccattgagggccaccgccgaggcgcgaggtttctcctagggctgttcctgggcctggctcttacaggcttggtcaggagggctggccttcttcactgccccctcctgtgtctgggtccacacacccttcagtaaccaacggcactgagaagcacagcacaggggctcagcctgggatccggtgatggtctgggcagaggctgggtcaggagtcccaaaggtcagtgacagtttctcagaagaggcccagcgtccacctctctcccagggccagacaccccttcctggctcccccatccccctatggctcccagccccttgcaccctcattgctgttcagattaaagcctctgttttgcacctgtcaaaaaaaaaaaaaaaaaaaaaaaa

SEQ ID NO: 400 - DNA, 1681 bp, Homo sapiens
ttagaacaattgctccccaataatttattttacaaacaggaatatgaaaaataaatggtggtaggaggaaggacccactaagaacaccatttttaaattttgctaagtaaggacattgagggaaaaaactcaaactctgatctaccatcattgtttaatgttcggcaaacatgaagcattttaataccaaaaaaagtgaggagaataaatctcagcataaaggaacaactttttaaactgaatttagcactatgaaaaatgtacctcattttctgtaattttagcgagtttcccgcggatgtacactggccccatggattggcgctggggatcaccagtttagaggtgccagtgccttctgacaaaggcccatggatccatatgactgcctgtctgttctttttagagacgggcccacactgcagagaagtgattgtgaaggtctccaaccctgtcatgcccccacctgccaccttgacttgggagagggacactcacaaaagcatgtcaaatcgacatccatttctttctctttccctcaggtctcagggagttttcctcttctcctcggactctttctctcaaggcctcttctacaaaaacccctgcccagagggttactgctaaaatgaaactcccgtgtctgtccccttccctggcccccaactgacttgcctgcctctgcttgctgctgtccctgcctattccccttcatgctggctctagaaagatgcaatctttttcccaggccccagcctctctggcctccctgccatccagcttctagcctcccttctctggaatctatggaagaatcatcaagcagcttctggaaatccaggagtctgtccttggtcatggtcatcttcaacctgtctgtgttcttgagaacgttcatgtgctcccagaaacattctttttgtctgcctttcctggtctggccacatttgactgtgtcacttctctcttttctcactcttctctgccctccacagacctccgtgctgccaggacttcctaacggaagggcttggctggctccccgaagccatccagaactggacccgagggacccagctcaacttgaatgtccttttatctgcccaggagatgggaagatgctgagaccatgcttcagtgctgtcccacatctgtctttctgagtttagacttggtttttccattatattccattcaactgatttttccatgatattccacaatgtcttacctaactctagctttctatactcaacagcaatgcctcctgagagcctcctgggtgtcaagtactctgttgtgtgcttttgaggactagggtgttagcaaggcacagtctctgactttgcagggctcacagattcatggggaaaattgatgttccagttacagtgaggcaaggcaatctggcagtaactccatagagaggaatgacaggctgggcctaggaatggaggggagcgggtaatagaggatcctaaggaaactgagagaagaggggctggagtgcggctggtctgcgctcctgtgcattgccttggctaacattttacttgtccttctgaatcaccctggcattgtcaacaaagaataatgtatgatccttcttggagtaaaaagccttcagcagtgcttcacaaaaaattctattgtatattttgtgtcctacctcaaattaatt

SEQ ID NO: 401 - DNA, 3511 bp, Homo sapiens
cggggcggcggcgggggccgggggggcccgggcgcgcgggagcgggagcggccgggggagccggagcgcaccatggaggcggcggcaggcggccgcggctgtttccagccgcacccggggctgcagaagacgctggagcagttccacctgagctccatgagctcgctgggcggcccggccgctttctcggcgcgctgggcgcaggaggcctacaagaaggagagcgccaaggaggcgggcgcggccgcggtgccggcgccggtgcccgcagccaccgagccgccgcccgtgctgcacctgcccgccatccagccgccgccgcccgtgctgcccgggcccttcttcatgccgtccgaccgctccaccgagcgctgcgagaccgtactggaaggcgagaccatctcgtgcttcgtggtgggaggcgagaagcgcctgtgtctgccgcagattctcaactcggtgctgcgcgacttctcgctgcagcagatcaacgcggtgtgcgacgagctccacatctactgctcgcgctgcacggccgaccagctggagatcctcaaagtcatgggcatcctgcccttctcggcgccctcgtgcgggctcatcaccaagacggacgccgagcgcctgtgcaacgcgctgctctacggcggcgcctacccgccgccctgcaagaaggagctggccgccagcctggcgctgggcctggagctcagcgagcgcagcgtccgcgtgtaccacgagtgcttcggcaagtgtaaggggctgctggtgcccgagctctacagcagcccgagcgccgcctgcatccagtgcctggactgccgcctcatgtacccgccgcacaagttcgtggtgcactcgcacaaggccctggagaaccggacctgccactggggcttcgactcggccaactggcgggcctacatcctgctgagccaggattacacgggcaaggaggagcaggcgcgcctcggccgctgcctggacgacgtgaaggagaaattcgactatggcaacaagtacaagcggcgggtgccccgggtctcctctgagcctccggcctccataagacccaaaacagatgacacctcttcccagtcccccgcgccttccgaaaaggacaagccgtccagctggctgcggaccttggccggctcttccaataagagcctgggctgtgttcaccctcgccagcgcctctctgctttccgaccctggtcccccgcagtgtcagcgagtgagaaagagctctccccacacctcccggccctcatccgagacagcttctactcctacaagagctttgagacagccgtggcgcccaacgtggccctcgcaccgccggcccagcagaaggttgtgagcagccctccgtgtgccgccgccgtctcccgggcccccgagcctctcgccacttgcacccagcctcggaagcggaagctgactgtggacaccccaggagccccagagacgctggcgcccgtggctgccccagaggaggacaaggactcggaggcggaggtggaagttgaaagcagggaggaattcacctcctccttgtcctcgctctcttccccgtcctttacctcatccagctccgccaaggacctgggctccccgggtgcgcgtgccctgccctcggccgtccctgatgctgcggcccctgccgacgcccccagtgggctggaggcggagctggagcacctgcggcaggcactggagggcggcctggacaccaaggaagccaaagagaagttcctgcatgaggtggtcaagatgcgcgtgaagcaggaggagaagctcagcgcagccctgcaggccaagcgcagcctccaccaggagctggagttcctacgcgtggccaagaaggagaagctgcgggaggccacggaggccaagcgtaacctgcggaaggagatcgagcgtctccgcgccgagaacgagaagaagatgaaagaggccaacgagtcacggctgcgcctgaagcgggagctggagcaggcgcggcaggcccgggtgtgcgacaagggctgcgaggcgggccgcctgcgcgccaagtactcggcccagatcgaagacctgcaggtgaagctgcagcacgcggaggcggaccgggagcagctgcgggccgacctgctgcgggagcgcgaggcccgggagcacctggagaaggtggtgaaggagctgcaggaacagctgtggccgcgggcccgccccgaggctgcgggcagcgagggcgctgcggagctggagccgtagattccgtgcctgccgccgcagcgccgccgacaacgcgggtgcaggggggcgcggctgggcggtgcagctccgcccggctccgcccctgcagcccacacagcacaacgtcttaccgtgcctattaccaagcgagtgtttgtaaccatgtagttttggaacccactgcaaaattttctactggccaagttcaagtgagtaagccgcgtcccccaactacagctggagacggggccagctcggcggcctgctggtcctctgcttgctggaacattctaacatttacacttttgttataagctatttaaaaccagtaaggagacttgaaattcagaaaatcaacacatttttaaatgactaacttctaaaagccccaacacatgacgccatctgaagacccgcaacggagtgggggtggcggccgccccaccctccccacccggggaagccatcacagctcatctgcccgcggctgcgtgaggacagcaggggtttttcttcagagtctattttttcagcgacaaggacccaggtcttcctgctgctgccagggagagcagggacagtgccgcgtgcgagatgagctcgaacactgcccgccttactgccgcctaccccgcccgccacgccgccgtcgatgccagcgctgtccccacgggtaccaggaagtgcagagccgcacaggagctgccccggagctgaggggacggtcttcggctcctctgcaccccgtgattctgcccacgctcctccaccacgaggcactgacctgcgtcgggtggtgaccgtggctggcggtcacgccctcagccctccgggcacacgtgccgcctgaccgggcgacccttttcagttcggcaaacgtcgctcccttcattttgggactgaggctgcagcattggaacaaaagagcattatttcaatttttctttctttttttttgttcgttcatttaaacgtatatttagaactgcactttgtccacaaccttcccttctctttctattccccagtgaactgaggtttttaccgactttatagagcagtcaaatccgaagtgctcgagtgcttagaaaccccctctggtgcttggttgaacaagggaatcacaaaaaaacgaaaatgcaaaaactgaacttcgggggtcgttctgtgccttccagcatcttgtacagcaaatcctgactcgtgtctttttacccccaagatatctgtcttcagtagcgactgaatctgccactctcagaataagttc

SEQ ID NO: 402 - DNA, 1249 bp, Homo sapiens
ctgattttctctttggattcttccaaaatcagagtcagactactccctgtgccatgaacggagatgacacctttgcaaggagacccacggttggtgctcaaataccagagaagatacaaaaggccttcgatgatattgccaaatacttctctaaggaagagtgggaaaagatgaaagtctcggagaaaatcgtctatgtgtatatgaagagaaagtatgaggccatgactaaactaggtttcaaggccatcctcccatctttcatgcgtaataaacgggtcacagacttccaggggaatgattttgataatgaccctaaccgtgggaatcaggttcaacgtcctcagatgactttcggcaggctccagggaatcttcccgaagatcatgcccaagaagccagcagaggaaggaaatgtttcgaaggaagtgccagaagcatctggcccacaaaacgatgggaaacagctgtgccccccgggaaaaccaactacctctgagaagattaacatgatatctggacccaaaaggggggaacatgcctggacccacagactgcgtgagagaaagcagctggtgatttatgaagagatcagcgatcctgaggaagatgatgagtaactccccttggggatatgacacatgcccatgatgagaagcagaacgtggtgacctttcacgaacatgggcatggctgtggacccctcgtcatcaggtgcatagcaagtgaaagcaagtgttcacaacagtgaaaagttgagcgtcatttttcttagtgtgccaagagtacgatattagcgtttccattgtattttcttgaagtgtgtcattctgttagatatgaacattttcactgatgagcaagacatacttaatgcatattttggtttgtgtatccatgcacctaccttagaaaacaagtattgtcagttacctctgcatggaacagcattaccctcctctctccctagatgtgactactgagggcagttctgagtgtttaatttcagattttttcctctgcatttacacacacacacaaaccacaccacacacacacacacacacacacacacacacaccaagtaccagtataagcatctcccatctgcttttcccattgccatgcgtcctggtcaggcttccctcactctgtttcctggtcagcatgtactcccctcatccgattcccctgtagcagtcactgacagtaaataaacctttgcaaacgttaaaaaaaaaaaaaaaaa

SEQ ID NO: 403 - DNA, 1606 bp, Homo sapiens
aaccacatcttcgtcccagccccggaggctcctgtgggcaagatcgtgagccaacgggttcctgaggcccctcctggccaggcagggtttccccgcgcgtttccgaggagccctgcctggccgggcggctggacaaacaggtcgtagcaccgatcgcgcccgcccccagcaggggtcccgcacaggcttgcccctgacccccacccaaacctgtccttccgctttgcccccaaacagtgcacttgccggcggtcccaacccagcaggagaagtggacatgaggttggcaggccctctccgcattgtggtcctagtcgtcagtgtgggtgtcacatggatcgtggtcagcatcctcctgggtgggcctggcagtggctttcctcgcatccagcaactcttcaccagtccagagagctcggtgactgcagcgccacgggccaggaagtacaagtgtggcctgccccagccgtgtcctgaggagcacctggccttccgcgtggtcagcggggccgccaacgtcattgggcccaagatctgcctcgaggacaagatgctgatgagcagcgtcaaggacaacgtgggccgcgggctgaacatcgccctggtgaacggggtcagcggcgagctcatcgaggcccgggcctttgacatgtgggccggagatgtcaacgacctgttgaagtttattcggccactgcacgaaggcaccctggtgttcgtggcatcctacgacgacccagccaccaagatgaatgaagagaccagaaagctcttcagtgagctgggcagcaggaacgccaaggagctggccttccgggacagctgggtgtttgtcggggccaagggtgtgcagaacaagagcccctttgagcagcacgtgaagaacagtaagcacagcaacaagtacgaaggctgccccgaggcgctggagatggaaggctgtatcccgcggagaagcacggccagctagcacggccagtgccaggaccgggccgagggaggccagaccaagggaggcacgcgcgctgccgggcggacagaggctgaggctcacaccccacacccgggcaggagcgctccctggccccaacacatcggggctccgaggcagtgaccagaacgtggtctcaaggtggtgggggctatgggggctgcagggggtagccctgccgcactttgtcacgggagcccagggtacccgcctccttttcgtaacactgttccccccggtcagcccatctagccctgtcctccattcctcacgccatctccatccccatcttgagtcctggaacggccctgggtgcctgcccctcactgtgcatctctgggagcagcccggcaggttggggcgtcttccagaacctctcccttctggagccactctgcactgcgggctaaacatgtttccagtgtgattccttccagtgagccaaacccggtggctgcttcatgagcctgactgcctctcgcctgctctcagcaggaagggacccctggagcaggctggcccggggtggtgaagtagctggagcccgatcacagtcccgcggtttgtcagggggcccaccttctagatgaccccttaataaagtgatggccccac

SEQ ID NO: 404 - DNA, 1743 bp, Homo sapiens
ttggttagccaagatggcggtagcgatcgctgcagcgagggtctggcggctaaaccgtggtttgagccaggctgccctcctgctgctgcggcagcctggggctcggggactggctagatctcacccccccaggcagcagcagcagttttcatctctggatgacaagccccagttcccaggggcctcggcggagtttatagataagttggaattcatccagcccaacgtcatctctggaatccccatctaccgcgtcatggaccggcaaggccagatcatcaaccccagcgaggacccccacctgccgaaggagaaggtgctgaagctctacaagagcatgacactgcttaacaccatggaccgcatcctctatgagtctcagcggcagggccggatctccttctacatgaccaactatggtgaggagggcacgcacgtggggagtgccgccgccctggacaacacggacctggtgtttggccagtaccgggaggcaggtgtgctgatgtatcgggactaccccctggaactattcatggcccagtgctatggcaacatcagtgacttgggcaaggggcgccagatgcctgtccactacggctgcaaggaacgccacttcgtcactatctcctctccactggccacgcagatccctcaggcggtgggggcggcgtacgcagccaagcgggccaatgccaacagggtcgtcatctgttacttcggcgagggggcagccagtgagggggacgcccatgccggcttcaacttcgctgccacacttgagtgccccatcatcttcttctgccggaacaatggctacgccatctccacgcccacctctgagcagtatcgcggcgatggcattgcagcacgaggccccgggtatggcatcatgtcaatccgcgtggatggtaatgatgtgtttgccgtatacaacgccacaaaggaggcccgacggcgggctgtggcagagaaccagccctttctcatcgaggccatgacctacaggatcgggcaccacagcaccagtgacgacagttcagcgtaccgctcggtggatgaggtcaattactgggataaacaggaccaccccatctcccggctgcggcactatctgctgagccaaggctggtgggatgaggagcaggagaaggcctggaggaagcagtcccgcaggaaggtgatggaggcctttgagcaggccgagcggaagcccaaacccaaccccaacctgctcttctcagacgtgtatcaggagatgcccgcccagctccgcaagcagcaggagtctctggcccgccacctgcagacctacggggagcactacccactggatcacttcgataagtgagacctgctcagcccacccccacccatcctcagctaccccgagaggtagccccactctaaggggcgcagggggacctgacagcacaccactgtcttccccagtcagctccctctaaaatactcagcggccagggcggctgccactcttcacccctgctcctcccgtgttacattctcaggggacagcatctgcagcagttgctgaggctccgtcagccccctcttcacctgttgttacagtgccttctcccaggggctgggtgatgggcacattcaggactagaagcccctctgggcatggggtggacatggcaggtcagcctgtggaacttgcgcaggtgcgactggccagcagaggtcacgaataaactgcatctctgcgcctggctctct

SEQ ID NO: 405 - DNA, 1097 bp, Homo sapiens
aagtgctgcgagccctgggccacgctggccgtgctggcagtgggccgcctcgatccctctgcagtctttcccttgaggctccaagaccagcaggtgaggcctcgcggcgctgaaaccgtgaggcccggaccacaggctccagatggaccctgggaaggacaaagagggggtgccccagccctcagggccgccagcaaggaagaaatttgtgatacccctcgacgaggatgaggtccctcctggagtggccaagcccttattccgatctacacagagccttcccactgtggacacctcggcccaggcggcccctcagacctacgccgaatatgccatctcacagcctctggaaggggctggggccacgtgccccacagggtcagagcccctggcaggagagacgcccaaccaggccctgaaacccggggcaaaatccaacagcatcattgtgagccctcggcagaggggcaatcccgtactgaagttcgtgcgcaacgtgccctgggaatttggcgacgtaattcccgactatgtgctgggccagagcacctgtgccctgttcctcagcctccgctaccacaacctgcacccagactacatccatgggcggctgcagagcctggggaagaacttcgccttgcgggtcctgcttgtccaggtggatgtgaaagatccccagcaggccctcaaggagctggctaagatgtgtatcctggccgactgcacattgatcctcgcctggagccccgaggaagctgggcggtacctggagacctacaaggcctatgagcagaaaccagcggacctcctgatggagaagctagagcaggacttcgtctcccgggtgactgaatgtctgaccaccgtgaagtcagtcaacaaaacggacagtcagaccctcctgaccacatttggatctctggaacagctcatcgccgcatcaagagaagatctggccttatgcccaggcctgggccctcagaaagcccggaggctgtttgatgtcctgcacgagcccttcttgaaagtaccctgatgaccccagctgccaaggaaacccccagtgtaataataaatcgtcctcccaggccaggctc

SEQ ID NO: 406 - DNA, 4336 bp, Homo sapiens
ggcgggtcccgcggcgaggcagctcctgggcataagctgtggccatgactactgaagtaggctctgtgtctgaagtgaagaaggactctagccagttaggaacagatgcaaccaaggaaaaacctaaagaagtagcagaaaatcagcagaatcagtcttccgatccagaggaggaaaaaggttcccagccacctcctgcagctgaaagccaaagtagtctacgccgccagaagagagagaaggaaacatcggagagcaggggtatttctcggttcataccgccatggcttaagaagcaaaagtcatataccttagtagtggccaaagatggaggagataaaaaagagcctacccaagctgttgttgaagaacaggtcttagataaagaggaaccccttccagaagaacagagacaggctaagggtgatgctgaagaaatggctcagaagaaacaagagattaaagttgaagtcaaggaagaaaaaccctcagtgagcaaggaagaaaaaccctcagtgagcaaagtggagatgcagcctactgaattagtaagtaaggagagagaagagaaggtaaaagaaacacaggaagacaaattagaaggaggagcagcaaaaagggagaccaaggaagtgcagaccaatgagctgaaagcagagaaggcatctcaaaaagtcaccaagaagaccaaaactgtccagtgtaaagtgaccctcttagatggcaccgaatacagctgtgacctggagaaacatgccaagggacaagtgttatttgacaaagtgtgtgaacacctcaatctcttggagaaagactactttggacttttgtttcaggaaagccctgagcagaaaaactggttagatcctgctaaagaaataaagagacaactgagaaaccttccatggctattcacttttaatgtgaagttttatcctcctgatccttctcaattgactgaagatatcaccagatacttcttgtgccttcagctccggcaggacattgcctctggccgcctgccctgctcttttgtgactcatgctctcctgggatcctacaccctgcaggctgaacttggtgactatgacccagaagaacatggcagcatcgacctcagtgaattccagtttgcccctactcagactaaggagctggaagagaaggtggcagagctgcacaaaacccacaggggcttatcgccagcacaagctgattcccagttcttagaaaatgcaaagaggctttccatgtatggtgttgacctacatcatgccaaggactcagaaggtgtggacatcaagctgggcgtgtgtgctaatggacttctcatttacaaagacagactgcgaatcaatcgttttgcttggccgaaaatcttaaaaatttcctataaacgcagtaacttctacattaaagtcagaccggcagagctggaacagtttgagagtaccattggattcaaactgccaaaccaccgggcagcgaaaagactatggaaagtgtgcgtggagcatcatactttctacaggcttgtttctccagagcagccaccaaaagccaagttcctgaccttggggtccaaatttcgctatagtggccgcacccaagcacagacccgccaggccagcaccctcatagataggccagcaccacactttgagcgcacttctagtaaacgggtctccaggagtctagatggagctccgattggtgtcatggaccaaagtcttatgaaggattttcctggcgctgctggggagatttcagcctatggacctggacttgtcagcattgccgtggtacaagatggggacggcaggagggaagtgagaagcccaactaaagccccacatttgcagctcattgaaggaaagaaaaattccttgagagtagaaggggataatatttatgtcagacatagcaatttaatgttggaggaactggataaggcccaggaggacatactgaaacatcaggctagcattagtgaactcaagcgcaattttatggaatccacacctgagccgcgccctaatgaatgggaaaaacgacgtatcacacctctgtccctacagacacaagggagttcacatgagactctgaatatagtggaggagaagaagcgggcagaggttgggaaagacgaaagagtaatcacagaagaaatgaatggtaaagagatatcacctgggagtggtcctggggagattcgtaaggtggagcctgtgacacaaaaagactccacctccctgtcttctgagagcagcagcagcagcagtgagagtgaggaggaagacgtgggagagtaccgtccccaccaccgagtgaccgagggcaccatcagggaggaacaggagtatgaagaagaggtggaggaagaaccccgcccggcagccaaggtagtagagagggaggaagcagtgcccgaagccagcccagtcacacaagcaggtgccagtgtaatcacagtagaaacagtgatccaggaaaatgtaggtgcccaaaagatacccggagagaagagtgtacacgaaggcgctcttaagcaagacatgggagaagaagcagaggaagagccacagaaagttaacggagaggtgtcccatgttgacattgatgttttgccacaaattatttgttgttcagagccaccagtggtaaaaacagagatggtaacaatttctgatgcctcacaaaggacagaaatctccaccaaggaagtccccattgtccaaactgagaccaaaaccatcacatatgagtctccacagattgatggcggggctggtggtgattcgggcacgttactgaccgcacaaaccatcacatctgagtccgtgtcaacaacgacaaccacacacatcaccaagactgtaaaaggtggaatttctgaaacaagaattgagaaacgcattgtgatcacaggagatggagatattgatcatgaccaggcactggctcaggcgatcagggaagccagagagcagcaccctgacatgtcggtcacaagagtggtggtacacaaagaaacagagttggctgaggaaggggaagattaagtaagaaagtcattttttaaacaacactcaactttgtgaacccctgaagattttttgaccgttccaagtcttaatgccacaccactattccagcgaatttatgctacaactggtaacaatgaccagaagcctgaagaattaaaatgccaacaccaaacctttccttaccagctctggtctatattgctcccatgcatttaatatattattttgttttataaccacttctaaatattctcagttctttctttttgttgttgttaattaaggggttttggttttgttttctgtttactttgtgtgcaactacctgcttttaatgactcactttgatcaaatgacagtgaacaaagccagcccaagctggtaaggtgctgttcacttgaacaggtgctgttgcgcagaaaggaaactctgtgactaatttagatagtggctttccttcttctggattcttttcattgaattctcacagtaaatatttacggagttttcaaattgcagcaaatatactgtatgagaaaatattaatacagattaaaagcctttcttacatcttgaaaattttctaatatttgagaatttcacagggatgttttttatattgggacccttttgactttccagtcctgtgactttctacttttagtagagagtcagaatctctggactggagaataatgaagaagttcactgactgtgcactgtgcttagagaccctgccgcaccacagtgccaatgcttgtcagacacatgcccttcggcagcattccagaacaggagggaagagaaagagaaaactttcttccctctactaaaagattcaggcagcttaaaaccttagtgctttctttcttaacatacccaaatttcaattctttccattatttgaacacttgggtagaactcttgctttgtattaaacctctttgtctacacatgtaaaacttaccttttgttattgagcaggcctatctctttcagatagttttatgattcacacaggtttgaggatgctggggagagggggagggggctgtggtggtgttctgttggttacaagaaagttataccatttaaagctggcaccagagacccgatagggacttattaactatattgaacattttttcctttgcctttgaccctatgtatagttacgatgccagattagatttatagcagcctcaagttgtattaaatgatattttgcttcctgtaatactattataaaataaagtttgtttattctctaaaaaaaaaaaaaaaaaaaa

SEQ ID NO: 407 - DNA, 4613 bp, Homo sapiens
catttgaatattaacatttgaggtgttctgaccagaagaagacagagcggatgatcattcattcaccacgttgacaacctcgcctgtgattgacagctggagtggcagaaagccatgagatttggtagttgggtctgaggggcgctttttttttccttttctttctttctttctttttttttttttaaactgatttttgggggagagaagatctgcttttttttgcccccgctgctgtcttggaaacggagcgcttttatgctcagtgactcgggcgctttgcttcaggtcccgtagaccgaagatctgggaccagtagctcacgttgctggagacgttaagggatttttcgtcgtgctttttttttttttttttttttttccgggggagtttgaatatttgtttcttttcacactggccttaaagaggatatattagaagttgaagtaggaagggagccagagaggccgatggcgcaaaggtacgacgatctaccccattacgggggcatggatggagtaggcatcccctccacgatgtatggggacccgcatgcagccaggtccatgcagccggtccaccacctgaaccacgggcctcctctgcactcgcatcagtacccgcacacagctcataccaacgccatggcccccagcatgggctcctctgtcaatgacgctttaaagagagataaagatgccatttatggacaccccctcttccctctcttagcactgatttttgagaaatgtgaattagctacttgtaccccccgcgagccgggggtggcgggcggggacgtctgctcgtcagagtcattcaatgaagatatagccgtgttcgccaaacagattcgcgcagaaaaacctctattttcttctaatccagaactggataacttgatgattcaagccatacaagtattaaggtttcatctattggaattagagaaggtacacgaattatgtgacaatttctgccaccggtatattagctgtttgaaagggaaaatgcctatcgatttggtgatagacgatagagaaggaggatcaaaatcagacagtgaagatataacaagatcagcaaatctaactgaccagccctcttggaacagagatcatgatgacacggcatctactcgttcaggaggaaccccaggcccttccagcggtggccacacgtcacacagtggggacaacagcagtgaacaaggtgatggcttggacaacagtgtagcttcccccagcacaggtgacgatgatgaccctgataaggacaaaaagcgtcacaaaaagcgtggcatctttcccaaagtagccacaaatatcatgagggcgtggctgttccagcatctaacacacccttacccttctgaagaacagaaaaagcagttggcacaagacacgggactcaccatccttcaagtgaacaattggtttattaatgcccggagaagaatagtgcagcccatgatagaccagtccaaccgagcagtaagtcaaggaacaccttataatcctgatggacagcccatgggaggtttcgtaatggacggtcagcaacatatgggaattagagcaccaggtaagactttgtttttgtggtagttcctcatttttgactccaagagtgtcatcccctcatcaacacaggtaaatccgcctcatccttttctgttatctcaagctggctgccttgccttgtctgctatctgtgcatctaagatattgcagaggggaagccaggatctttatgcactgaagatctcactatttctcaaccctctagatcctgttttttttttaagggtcttttggcactatctgttgactttgctcattttctggcctcttcttggatttttatctcccttctaggacctatgagtggaatgggcatgaatatgggcatggaggggcagtggcactacatgtaaccttcatctagttaaccaatcgcaaagcaagggggaagtaagtacaaatggggtctttgttttcactttgtcctgggaatatttttcctcttgcattttcttatgttctccttgcccatagcttcatgcttgttcattcctttccattaaactcctggtttcttgcttccatcattttctttttggttgtgatcaagcttttaagcttataaatactgtgtatgatgtacatttatcctgtgtgttgctattgtacagtactgaccacatgacaaaacaagaaacagtcaggaggtgggggagtgggttgtcatagcaacagactgatttgcaaaatgtaagcagtctgcagcagtgcaaggagaggaaagagcatgtccccaaagtgtcataaatctgtctaaccgcagttgatgcatgagttacatttctacactaacctgcaagacaccgaaaagctaaacggagacttcttttaggtaaaataaacacaagctttacttagggtaagtaaaggcatattttgagctccagtcaactaaactttgattttttttcttagtttattcctttgtctgtccatcataatgggattacgtgtggcaatgggaaaagggagaatacaaaatagaggtgtgcacagcaggctgcggggcttagcccaggctaattgactatatccaaattaagtatgccatcacttgcagtgtgacaaatggatttgacttattcagtatacaaaaatagagatcattaatgcaatcttcagtggcaggcctagtgaagtgggcctaggaaaactgtcccagattctcactcttgcattttctctcctataaagacactccagcaattcgagttcaaacaagtaaaactgttttgaacaccaaggctcttattcacttcctaaattacccctaatagcactgttcttgctttgtttttgaaattaaaagcagttatttcagagtcttgcttgtgtctctgattatatttatgcactatttaaaatcactgctgaggccaggggtaattcgtactggtcatcttctctgggtgtgagtcaaatataagtttaacaattagctctgaaaacattccattgagctggggaatgcaacagtcttattacctcatcatggaattctctagcttagttaatttaaatattgtttcttagtttctgggtcaattaaatttaaatgatgtagtttatgcttcgtgaccaattaaattactaggttattacaaaaaaattatcatcttttttgattaaagagctgtgggtacagtatattttataagcaattttcattagttcaaaaatgttcctttaggctagattaagcagccattcattgttagagcctggagaccttattcgaaggtgttcatcgtattcacagtgcactattacttagaactaaagccaattgaacctacttagcaatagcgttatgcctttcacccttgatgattatggagcttatagctctcagaaacaatacacctgtcagtttccatcaactatagcaatccatgcagaagacaagaggccccctcaaagcaggaggggtattgttttaggtccaatttttcttattgttctcaaaatcattataaggtggacagtgttttgtgaagattttcttttccccagctctaagaaaccatgtggaaagaattcattgataactgttttgatttttttctttttttaagtacaggttttgctaagtaatcacccttagtgagcctgtgtagttcagctgcctgtgagatgtttggtgaccagctcagtgtattcttgtattcttgatagagaatatttcaggagacaaaagtgcttcttcagaccagacctcaaataacaattttattctttttaataaataagacctcagtaggcggacctgataacagtgacaatgaaaggaaaatagtggcaaaatgtgagtttccagcatgatgtttctcattttattttcttctgtatgaatcaaaagaatgctttacaaaaccatgttcccttaatcacagtgttctctggcttttataggattgtcatagccaggaccacactattgctttttcataacattttctttttgtttctttcttttgaatttcttacagggctgcaaagtatgccaggggagtatgtagcccggggtggtccaatgggtgtgagtatgggacagccaagttatacccaaccccagatgcccccccatcctgctcagctgcgtcatgggccccccatgcatacgtacattcctggacaccctcaccacccaacagtgatgatgcatggaggaccgccccgccctggaatgccaatgtcagcatcaagccccacagttcttaatacaggagacccaacaatgagtggacaagtcatggacattcatgctcagtagcttaagggaatatgcattgtctgcaatggtgactgatttcaaatcatgttttttctgcaatgactgtggagttccattcttggcatctactctggaccaaggagcatccctaattcttcatagggacctttaaaaagcaggaaataccaactgaagtcaatttggggggacatgctaaataactatataagacattaagagaacaaagagtgaaatattgtaaatgctattatactgttatccataaaaaaaaaaaa

SEQ ID NO: 408 - DNA, 3304 bp, Homo sapiens
gcgaccgaacgcggcggtcggcagcgttcgcgcgggggcctgcgaagcgctgctcggggccggcactgcccgcggggaggacgcgccgccgccgccacccagcgccgccgccgccgccgcctccagccgggccgccgcgcgtcccgggggccggccccgcgagcgcaggagtaaacaccgccggagtcttggagccgctgcagaagggaataaagagagatgcagggatttgtgaggttacggcgccccagctgcaagatgcactagccggctgaacccgggatcggctgacttgttggaaccggagtgctctgcacggagagtggtggatgagttgaagttgccttcccggggctcattttccacgctgccgagaggaatccgagaggcaaggcaatcacttcgtcttgccattgattgggtatcgggagctttttttttctcccctctctctttcttttcctccgtcttgttgcatgcaagaaaattacagtccgctgctcgcccgccctgggtgcgagatattcagccccgctctctcccgtgcattgtgcaacccaaagatgaaagaccgaaggggagaaagttaaagaaatcgcccacatgcgctggatcagtccacggcttggggaaaggcatccagagaaggtgggagcggagagtttgaagtctttacaggcgggaagatggcggactggagctgaaagtgttgattgggaaacttgggtgattcttgtgtttatttacaatcctcttgacccaggcaggacacatgcaggccaaaaaacgctatttcatcctgctctcagctggctcttgtctcgcccttttgttttatttcggaggcttgcagtttagggcatcgaggagccacagccggagagaagaacacagcggtaggaatggcttgcaccaccccagtccggatcatttctggccccgcttcccggagcctctgcgccccttcgttccttgggatcaattggaaaacgaggattccagcgtgcacatttccccccggcagaagcgagatgccaactccagcatctacaaaggcaagaagtgccgcatggagtcctgcttcgatttcaccctttgcaagaaaaacggcttcaaagtctacgtatacccacagcaaaaaggggagaaaatcgccgaaagttaccaaaacattctagcggccatcgagggctccaggttctacacctcggaccccagccaggcgtgcctctttgtcctgagtctggatactttagacagagaccagttgtcacctcagtatgtgcacaatttgagatccaaagtgcagagtctccacttgtggaacaatggtaggaatcatttaatttttaatttatattccggcacttggcctgactacaccgaggacgtggggtttgacatcggccaggcgatgctggccaaagccagcatcagtactgaaaacttccgacccaactttgatgtttctattcccctcttttctaaggatcatcccaggacaggaggggagagggggtttttgaagttcaacaccatccctcctctcaggaagtacatgctggtattcaaggggaagaggtacctgacagggataggatcagacaccaggaatgccttatatcacgtccataacggggaggacgttgtgctcctcaccacctgcaagcatggcaaagactggcaaaagcacaaggattctcgctgtgacagagacaacaccgagtatgagaagtatgattatcgggaaatgctgcacaatgccactttctgtctggttcctcgtggtcgcaggcttgggtccttcagattcctggaggctttgcaggctgcctgcgtccctgtgatgctcagcaatggatgggagttgccattctctgaagtgattaattggaaccaagctgccgtcataggcgatgagagattgttattacagattccttctacaatcaggtctattcatcaggataaaatcctagcacttagacagcagacacaattcttgtgggaggcttatttttcttcagttgagaagattgtattaactacactagagattattcaggacagaatattcaagcacatatcacgtaacagtttaatatggaacaaacatcctggaggattgttcgtactaccacagtattcatcttatctgggagattttccttactactatgctaatttaggtttaaagcccccctccaaattcactgcagtcatccatgcggtgacccccctggtctctcagtcccagccagtgttgaagcttctcgtggctgcagccaagtcccagtactgtgcccagatcatagttctatggaattgtgacaagcccctaccagccaaacaccgctggcctgccactgctgtgcctgtcgtcgtcattgaaggagagagcaaggttatgagcagccgttttctgccctacgacaacatcatcacagacgccgtgctcagccttgacgaggacacggtgctttcaacaacagaggtggatttcgccttcacagtgtggcagagcttccctgagaggattgtggggtaccccgcgcgcagccacttctgggataactctaaggagcggtggggatacacatcaaagtggacgaacgactactccatggtgttgacaggagctgctatttaccacaaatattatcactacctatactcccattacctgccagccagcctgaagaacatggtggaccaattggccaattgtgaggacattctcatgaacttcctggtgtctgctgtgacaaaattgcctccaatcaaagtgacccagaagaagcagtataaggagacaatgatgggacagacttctcgggcttcccgttgggctgaccctgaccactttgcccagcgacagagctgcatgaatacgtttgccagctggtttggctacatgccgctgatccactctcagatgaggctcgaccccgtcctctttaaagaccaggtctctattttgaggaagaaataccgagacattgagcgactttgaggaatccggctgagtgggggaggggaagcaagaagggatgggggtcaagctgctctctcttcccagtgcagatccactcatcagcagagccagattgtgccaactatccaaaaacttagatgagcagaatgacaaaaaaaaaaaaggccaatgagaactcaactcctggctcctgggactgcaccagactgctccaaactcacctcactggcttctgtgtcccaagactaggttggtacagtttaattatggaacattaaataattatttttgaaaaaaaaaaaaaaaaaa

SEQ ID NO: 409 - DNA, 3525 bp, Homo sapiens
agctaaggagggagggagagggtttagaaataccagcataataagtagtatgactgggtgctctgtaaattaactcaattagacaaagcctgacttaacgggggaagatggtgagaagcgctaccctcattaaatttggttgttagaggcgcttctaaggaaattaagtctgttagttgtttgaatcacataaaattgtgtgtgcacgttcatgtacacatgtgcacacatgtaacctctgtgattcttgtgggtatttttttaagaagaaaggaatagaaagcaaagaaaaataaaaaatactgaaaagaaaagactgaaagagtagaagataaggagaaaagtacgacagagacaaggaaagtaagagagagagagagctctcccaattataaagccatgagccccctttggtgggggtttctgctcagttgcttgggctgcaaaatcctgccaggagcccagggtcagttcccccgagtctgcatgacggtggacagcctagtgaacaaggagtgctgcccacgcctgggtgcagagtcggccaatgtctgtggctctcagcaaggccgggggcagtgcacagaggtgcgagccgacacaaggccctggagtggtccctacatcctacgaaaccaggatgaccgtgagctgtggccaagaaaattcttccaccggacctgcaagtgcacaggaaactttgccggctataattgtggagactgcaagtttggctggaccggtcccaactgcgagcggaagaaaccaccagtgattcggcagaacatccattccttgagtcctcaggaaagagagcagttcttgggcgccttagatctcgcgaagaagagagtacaccccgactacgtgatcaccacacaacactgggtgggcctgcttgggcccaatggaacccagccgcagtttgccaactgcagtgtttatgatttttttgtgtggctccattattattctgttagagatacattattaggtgggttttttccttggctgaaggtatattattacaggtttgtgattgggttgagggtatggcagtgggaagtaatttcatgcaagttaattaagagagcaaccacaaggcagccttaggtttatgaaagtcgtagaattatcaaataccgcctggagttagaaggaagcagtttcttcctgtgcattggatgcagacactttaaatgttctctcctctaccgtatgttcttggttcaaagtgtaaacttttctctgtgaagctgttaatcatcaaagatgtgagttggtgaggtggaggcgaattccttttgatttcagaagaaaatatttgcgaatctggccatggaagccctctctgaccttttctccaaattagaggaattaactgaacatgtgctaaggcacatgaagcttctttgtgcggaattagagtgctcatgttgggagtgggcatcttgttaaactcacaggatagatcaactttggatggattttagacagtctatcacatgatagactttcagataatcatttatggtactcctgcatggtccggaatccccaggtttcttggagctttattgtcaaggaaaagtacaagcttagccacagcaatgtagagtttctgctgcttagctctttgcaacacagtcatgttggatgcttgagaaattggtgacctgcccttccaagtcttaaaaattgggggctgggtaggacttggaatgagggggttgtctgttacaaacttcatgtatcaagtaggttcagctttgtccttatttttcagtcaaaggaaagccatagacaccaatgtattccaggagggcttgactccatcctagattcttcccatagcagttcttgaatgcatggctgcacgtgcacctctccccatttttggggtccttcattggggtcaggatgaatgaagacatcaagctcactttgaagagcaagattctgatttggacaggttcatccttctgctcatcacttgttccccttcaattgataccctctcgttgttgggttctgagaatttgaaaccttgctctgaattgaacatgaaaaagggccgtgtagccaacatcagggacagcagtgcttttctcagtgtgagtcttttaaaacttgccttacaggtaagcatctgtctgtctttatcgatagataaggaggctcttttggctataaacctttatagttttcctgttatcactctgaggaattattgctttatgagagagtactctctcaagaggaaaagaaagtcctagtttctggtcatagctacgaattaaatttatattcacgtctgttcagctctctgaagttgttataggtattttggacaagaactaaagttagctaaagtttccacataaccatcaaagctgttatgaaaaagggaagaaggatggaccaggcagtaaggaggtcattaaatcgtccagagcttttcactaaaattggcagttccagtgtccagcctaaatggcttgaatgtatttttctctcttctggtctcagcgaacatgcttgtcagctagtagttataacagattgatgggtgaggcaaaatacgcgaaagttctttttggttacataaatactgcattaggactaagtgcagttgaagttacaatattattaattaatccctcccttttaaatttatatctttgtgaagcataggttagcaaatgcctttaaaaaatatatttcctttaggtcttaatgatctattcttttggatagtctatttcacctgaatggattgttgcttacaaattaaatatgtatcaggggctcccaatcctgaaagtcacctgaatttcctggatctctgctagaaatcaaccttttaagagataaaggagggtttatcctaaaagtactagttacttctgaaattcatgtcattactattgcttttggagatataaataacaacaaaacttttttttcttactactataaaacatcatggacttattggctctatagatacagcccaggtaagatttaacattttaaaaaattctattctgtcatctctaatatgtttcccaattgtttcaggaccaggacgcccctacagggccatagatttctcacatcaaggacctgcatttgttacctggcaccggtaccatttgttgtgtctggaaagagatctccagcgactcattggcaatgagtcttttgctttgccctactggaactttgccactgggaggaacgagtgtgatgtgtgtacagaccagctgtttggggcagcgagaccagacgatccgactctgattagtcggaactcaagattctccagctgggaaactgtctgtgataggtaatggctcctgtacctgcaatggcatccagagattgtcttttctgatgtctgagacatggaggagaagtcactttatagtgctgtttcttatgcatgtggtgtcctatttacatgtttctaaaaacagttttcctctgggaggtgggatttcaaaaattcaaagctctttaatt

SEQ ID NO: 410 - DNA, 2361 bp, Homo sapiens
cacttcgtagggcctaccggcatctgatataaacaatctgcatattgggattgtcagggaatgttcttaaagatcagattagtggcacctgctgagatactgatgcacagcatggtttctgaaccagtagtttccctgcagttgagcagggagcagcagcagcacttgcacaaatacatatacactcttaacacttcttacctactggcttcctctagcttttgtggcagcttcaggtatatttagcactgaacgaacatctcaagaaggtataggcctttgtttgtaagtcctgctgtcctagcatcctataatcctggacttctccagtactttctggctggattggtatctgaggctagtaggaagggcttgttcctgctgggtagctctaaacaatgtattcatgggtaggaacagcagcctattctgccagccttatttctaaccattttagacatttgttagtacatggtattttaaaagtaaaacttaatgtcttccttttttttctccactgtctttttcatagatcgagacatgtaagcagcatcatggaggtaagtttttgaccttgagaaaatgtttttgtttcactgtcctgaggactatttatagacagctctaacatgataaccctcactatgtggagaacattgacagagtaacattttagcagggaaagaagaatcctacagggtcatgttcccttctcctgtggagtggcatgaagaaggtgtatggccccaggtatggccatattactgaccctctacagagagggcaaaggaactgccagtatggtattgcaggataaaggcaggtggttacccacattacctgcaaggctttgatctttcttctgccatttccacattggacatctctgctgaggagagaaaatgaaccactcttttcctttgtataatgttgttttattcttcagacagaagagaggagttatacagctctgcagacatcccattcctgtatggggactgtgtttgcctcttagaggttcccaggccactagaggagataaagggaaacagattgttataacttgatataatgatactataatagatgtaactacaaggagctccagaagcaagagagagggaggaacttggacttctctgcatctttagttggagtccaaaggctcttcaatgaaattctactgcccagggtacattgatgctgaaaccccattcaaatctcctgttatattctagaacagggaattgatttgggagagcatcaggaaggtggatgatctgcccagtcacactgttagtaaattgtagagccaggacctgaactctaatatagtcatgtgttacttaatgacggggacatgttctgagaaatgcttacacaaacctaggtgttgtagcctactacacgcataggctacatggtatagcctattgctcctagactacaaacctgtacagcctgttactgtactgaatactgtgggcagttgtaacacaatggtaagtatttgtgtatctaaacatagaagttgcagtaaaaatatgctattttaatcttatgagaccactgtcatatatacagtccatcattgaccaaaacatcatatcagcatttttttcttctaagattttgggagcaccaaagggatacactaacaggatatactctttataatgggtttggagaactgtctgcagctacttcttttaaaaaggtgatctacacagtagaaattagacaagtttggtaatgagatctgcaatccaaataaaataaattcattgctaacctttttcttttcttttcaggtttgaagatgccgcatttggattggatgaattccaaattctgcttgcttgctttttaatattgatatgcttatacacttacactttatgcacaaaatgtagggttataataatgttaacatggacatgatcttctttataattctactttgagtgctgtctccatgtttgatgtatctgagcaggttgctccacaggtagctctaggagggctggcaacttagaggtggggagcagagaattctcttatccaacatcaacatcttggtcagatttgaactcttcaatctcttgcactcaaagcttgttaagatagttaagcgtgcataagttaacttccaatttacatactctgcttagaatttgggggaaaatttagaaatataattgacaggattattggaaatttgttataatgaatgaaacattttgtcatataagattcatatttacttcttatacatttgataaagtaaggcatggttgtggttaatctggtttatttttgttccacaagttaaataaatcataaaacttgaaaaaaaaaaaa

SEQ ID NO: 411 - DNA, 2136 bp, Homo sapiens
gccctggaggcccggcctggccgctcccggccctggggtgcacatcggccctgagtcccgtcccaggctctgggctcgggcagccgccgccaccgctgcccaggacgtcgggcctcctgccttcctcccaggcccccacgttgctggccgcctggccgagtggccgccatgctcctgccttgggccacctctgcccccggcctggcctgggggcctctggtgctgggcctcttcgggctcctggcagcatcgcagccccaggcggtgcctccatatgcgtcggagaaccagacctgcagggaccaggaaaaggaatactatgagccccagcaccgcatctgctgctcccgctgcccgccaggcacctatgtctcagctaaatgtagccgcatccgggacacagtttgtgccacatgtgccgagaattcctacaacgagcactggaactacctgaccatctgccagctgtgccgcccctgtgacccagtgatgggcctcgaggagattgccccctgcacaagcaaacggaagacccagtgccgctgccagccgggaatgttctgtgctgcctgggccctcgagtgtacacactgcgagctactttctgactgcccgcctggcactgaagccgagctcaaagatgaagttgggaagggtaacaaccactgcgtcccctgcaaggcagggcacttccagaatacctcctcccccagcgcccgctgccagccccacaccaggtgtgagaaccaaggtctggtggaggcagctccaggcactgcccagtccgacacaacctgcaaaaatccattagagccactgcccccagagatgtcaggaaccatgctgatgctggccgttctgctgccactggccttctttctgctccttgccaccgtcttctcctgcatctggaagagccacccttctctctgcaggaaactgggatcgctgctcaagaggcgtccgcagggagagggacccaatcctgtagctggaagctgggagcctccgaaggcccatccatacttccctgacttggtacagccactgctacccatttctggagatgtttccccagtatccactgggctccccgcagccccagttttggaggcaggggtgccgcaacagcagagtcctctggacctgaccagggagccgcagttggaacccggggagcagagccaggtggcccacggtaccaatggcattcatgtcaccggcgggtctatgactatcactggcaacatctacatctacaatggaccagtactggggggaccaccgggtcctggagacctcccagctacccccgaacctccataccccattcccgaagagggggaccctggccctcccgggctctctacaccccaccaggaagatggcaaggcttggcacctagcggagacagagcactgtggtgccacaccctctaacaggggcccaaggaaccaatttatcacccatgactgacggagtctgagaaaaggcagaagaaggggggcacaagggcactttctcccttgaggctgccctgcccacgtgggattcacaggggcctgagtagggcccggggaagcagagccctaagggattaaggctcagacacctctgagagcaggtgggcactggctgggtacggtgccctccacaggactctccctactgcctgagcaaacctgaggcctcccggcagacccacccaccccctggggctgctcagcctcaggcacggacagggcacatgataccaactgctgcccactacggcacgccgcaccggagcacggcaccgagggagccgccacacggtcacctgcaaggacgtcacgggcccctctaaaggattcgtggtgctcatccccaagcttcagagaccctttggggttccacacttcacgtggactgaggtagaccctgcatgaagatgaaattatagggaggacgctccttccctcccctcctagaggagaggaaagggagtcattaacaactagggggttgggtaggattcctaggtatggggaagagttttggaaggggaggaaaatggcaagtgtatttatattgtaaccacatgcaaataaaaagaatgggacctaaactcgtgccgctcgtgccgaattcctgcag

SEQ ID NO: 412 - DNA, 1750 bp, Homo sapiens
gtggccgccgtcgcccggatcccctgagctgcccgccatcccacgtgaccgcgccgccccccagctccaccgctgagcccgctcgccatggccctcttcggggccctcttcctagcgctgctggcaggcgcacatgcagagttcccaggctgcaagatccgcgtcacctccaaggcgctggagctggtgaagcaggaggggctgcgctttctggagcaagagctggagactatcaccattccggacctgcggggcaaagaaggccacttctactacaacatctctgaggtgaaggtcacagagctgcaactgacatcttccgagctcgatttccagccacagcaggagctgatgcttcaaatcaccaatgcctccttggggctgcgcttccggagacagctgctctactggttcttctatgatgggggctacatcaacgcctcagctgagggtgtgtccatccgcactggtctggagctctcccgggatcccgctggacggatgaaagtgtccaatgtctcctgccaggcctctgtctccagaatgcacgcggccttcgggggaaccttcaagaaggtgtatgattttctctccacgttcatcacctcagggatgcgcttcctcctcaaccagcagatctgccctgtcctctaccacgcagggacggtcctgctcaactccctcctggacaccgtgcctgtgcgcagttctgtggacgagcttgttggcattgactattccctcatgaaggatcctgtggcttccaccagcaacctggacatggacttccggggggccttcttccccctgactgagaggaactggagcctccccaaccgggcagtggagccccagctgcaggaggaagagcggatggtgtatgtggccttctctgagttcttcttcgactctgccatggagagctacttccgggcgggggccctgcagctgttgctggtgggggacaaggtgccccacgacctggacatgctgctgagggccacctactttgggagcattgtcctgctgagcccagcagtgattgactccccattgaagctggagctgcgggtcctggccccaccgcgctgcaccatcaagccctctggcaccaccatctctgtcactgctagcgtcaccattgccctggtcccaccagaccagcctgaggtccagctgtccagcatgactatggacgcccgtctcagcgccaagatggctctccgggggaaggccctgcgcacgcagctggacctgcgcaggttccgaatctattccaaccattctgcactggagtcgctggctctgatcccattacaggcccctctgaagaccatgctgcagattggggtgatgcccatgctcaatgagcggacctggcgtggggtgcagatcccactacctgagggcatcaactttgtgcatgaggtggtgacgaaccatgcgggattcctcaccatcggggctgatctccactttgccaaagggctgcgagaggtgattgagaagaaccggcctgctgatgtcagggcgtccactgcccccacaccgtccacagcagctgtctgagccctcaatccccaagctggcagctgtcattcaggaccccaacccctctcagcccctcttttcccacattcatagcctgtagtgccccctctaacccccagtgccacagagaagacgggatttgaagctgtacccaatttaattccataatcaatctatcaattacagtccgtccaccacc

SEQ ID NO: 413 - DNA, 2815 bp, Homo sapiens
gaattcggcacgagctcttctcccctgattcaagactcctctgctttggactgaagcactgcaggagtttgtgaccaagaacttcaagagtcaagacagaaggaagccaagggagcagtgcaatggatttctcagtaaaggtagacatagagaaggaggtgacctgccccatctgcctggagctcctgacagaacctctgagcctagattgtggccacagcttctgccaagcctgcatcactgcaaagatcaaggagtcagtgatcatctcaagaggggaaagcagctgtcctgtgtgtcagaccagattccagcctgggaacctccgacctaatcggcatctggccaacatagttgagagagtcaaagaggtcaagatgagcccacaggaggggcagaagagagatgtctgtgagcaccatggaaaaaaactccagatcttctgtaaggaggatggaaaagtcatttgctgggtttgtgaactgtctcaggaacaccaaggtcaccaaacattccgcataaacgaggtggtcaaggaatgtcaggaaaagctgcaggtagccctgcagaggctgataaaggaggatcaagaggctgagaagctggaagatgacatcagacaagagagaaccgcctggaagatcgagagacagaagattctgaaagggttcaatgaaatgagagtcatcttggacaatgaggagcagagagagctgcaaaagctggaggaaggtgaggtgaatgtgctggacaacctggcagcagctacagaccagctggtccagcagaggcaggatgccagcacgctcatctcagatctccagcggaggttgacgggatcgtcagtagagatgctgcaggatgtgattgacgtcatgaaaaggagtgaaagctggacattgaagaagccaaaatctgtttccaagaaactaaagagtgtattccgagtaccagatctgagtgggatgctgcaagttcttaaagagctgacagatgtccagtactactgggtggacgtgatgctgaatccaggcagtgccacttcgaatgttgctatttctgtggatcagagacaagtgaaaactgtacgcacctgcacatttaagaattcaaatccatgtgatttttctgcttttggtgtcttcggctgccaatatttctcttcggggaaatattactgggaagtagatgtgtctggaaagattgcctggatcctgggcgtacacagtaaaataagtagtctgaataaaaggaagagctctgggtttgcttttgatccaagtgtaaattattcaaaagtttactccagatatagacctcaatatggctactgggttataggattacagaatacatgtgaatataatgcttttgaggactcctcctcttctgatcccaaggttttgactctctttatggctgtgctccctgtcgtattggggttttcctagactatgaggcaggcattgtctcatttttcaatgtcacaaaccacggagcactcatctacaagttctctggatgtcgcttttctcgacctgcttatccgtatttcaatccttggaactgcctagtccccatgactgtgtgcccaccgagctcctgagtgttctcattcctttacccacttctgcatagtagcccttgtgctgagactcagattctgcacctgagttcatctctactgagaccatctcttcctttctttccccttcttttacttagaatgtctttgtattcatttgctagggcttccatagcaaagcatcatagattgctgatttaaactgtaattgtattgccgtactgtgggctggaaatcccaaatctagattccagcagagttggttctttctgaggtctgcaaggaagggctctgttccatgcctctctccttggcttgtagaaggcatcttgtccctatgactcttcacattgtctttatgtacatctctgtgcccaagttttccctttttattaagacaccagtcatactggctcagggcccaccgctaatgccttaatgaaatcattttaacattatattctctacaaagaccttatttccaaataagataatatttggaggtattgggaataaaatttgaggaaggcacgatttcactcataacaatcttaccctttcttgcaagagatgcttgtacattattttcctaataccttggtttcactagtagtaaacattattattttttttatatttgcaaaggaaacatatctaatccttcctatagaaagaacagtattgctgtaattccttttcttttcttcctcatttcctctgccccttaaaagattgaagaaagagaaacttgtcaactcatatccacgttatctagcaaaagtcataagaatctatcactaagtaatgtatccttcagaatgtgttggtttaccagtgacaccccatattcatcacaaaattaaagcaagaagtccatagtaatttatttgctaatagtggatttttaatgctcagagtttctgaggtcaaattttatcttttcacttacaagctctatgatcttaaataatttacttaatgtattttggtgtattttcctcaaattaatattggtgttcaagactatatctaattcctctgatcactttgagaaacaaacttttattaaatgtaaggcacttttctatgaattttaaatataaaaataaatattgttctgattattactgaaaagatgtcagccatttcaatgtcttgggaaacaattttttgtttttgttctgttttctttttgcttcaataaaacaatagctggctctaaaaaaaaaa

SEQ ID NO: 414 - DNA, 2958 bp, Homo sapiens
ggcacgagggtgtgcgtgatggagaaaattgggcaccagggctgctcccgagattctcagatctgatttccacgcttgctaccaaaatagtctgggcaggccacttttggaagtaggcgttatctagtgagcaggcggccgctttcgatttcgctttcccctaaatggctgagcttctcgccagcgcaggatcagcctgttcctgggactttccgagagccccgccctcgttccctcccccagccgccagtaggggaggactcggcggtacccggagcttcaggccccaccggggcgcggagagtcccagacccggccgggaccgggacggcgtccgagtgccaatggctagctctaggtgtcccgctccccgcgggtgccgctgcctccccggagcttctctcgcatggctggggacagtactgctacttctcgccgactgggtgctgctccggaccgcgctgccccgcatattctccctgctggtgcccaccgcgctgccactgctccgggtctgggcggtgggcctgagccgctgggccgtgctctggctgggggcctgcggggtcctcagggcaacggttggctccaagagcgaaaacgcaggtgcccagggctggctggctgctttgaagccattagctgcggcactgggcttggccctgccgggacttgccttgttccgagagctgatctcatggggagcccccgggtccgcggatagcaccaggctactgcactggggaagtcaccctaccgccttcgttgtcagttatgcagcggcactgcccgcagcagccctgtggcacaaactcgggagcctctgggtgcccggcggtcagggcggctctggaaaccctgtgcgtcggcttctaggctgcctgggctcggagacgcgccgcctctcgctgttcctggtcctggtggtcctctcctctcttggggagatggccattccattctttacgggccgcctcactgactggattctacaagatggctcagccgataccttcactcgaaacttaactctcatgtccattctcaccatagccagtgcagtgctggagttcgtgggtgacgggatctataacaacaccatgggccacgtgcacagccacttgcagggagaggtgtttggggctgtcctgcgccaggagacggagtttttccaacagaaccagacaggtaacatcatgtctcgggtaacagaggacacgtccaccctgagtgattctctgagtgagaatctgagcttatttctgtggtacctggtgcgaggcctatgtctcttggggatcatgctctggggatcagtgtccctcaccatggtcaccctgatcaccctgcctctgcttttccttctgcccaagaaggtgggaaaatggtaccagttgctggaagtgcaggtgcgggaatctctggcaaagtccagccaggtggccattgaggctctgtcggccatgcctacagttcgaagctttgccaacgaggagggcgaagcccagaagtttagggaaaagctgcaagaaataaagacactcaaccagaaggaggctgtggcctatgcagtcaactcctggaccactagtatttcaggtatgctgctgaaagtgggaatcctctacattggtgggcagctggtgaccagtggggctgtaagcagtgggaaccttgtcacatttgttctctaccagatgcagttcacccaggctgtggaggtactgctctccatctaccccagagtacagaaggctgtgggctcctcagagaaaatatttgagtacctggaccgcacccctcgctgcccacccagtggtctgttgactcccttacacttggagggccttgtccagttccaagatgtctcctttgcctacccaaaccgcccagatgtcttagtgctacaggggctgacattcaccctacgccctggcgaggtgacggcgctggtgggacccaatgggtctgggaagagcacagtggctgccctgctgcagaatctgtaccagcccaccgggggacagctgctgttggatgggaagccccttccccaatatgagcaccgctacctgcacaggcaggtggctgcagtgggacaagagccacaggtatttggaagaagtcttcaagaaaatattgcctatggcctgacccagaagccaactatggaggaaatcacagctgctgcagtaaagtctggggcccatagtttcatctctggactccctcagggctatgacacagaggtagacgaggctgggagccagctgtcagggggtcagcgacaggcagtggcgttggcccgagcattgatccggaaaccgtgtgtacttatcctggatgatgccaccagtgccctggatgcaaacagccagttacaggtggagcagctcctgtacgaaagccctgagcggtactcccgctcagtgcttctcatcacccagcacctcagcctggtggagcaggctgaccacatcctctttctggaaggaggcgctatccgggaggggggaacccaccagcagctcatggagaaaaaggggtgctactgggccatggtgcaggctcctgcagatgctccagaatgaaagccttctcagacctgcgcactccatctccctcccttttcttctctctgtggtggagaaccacagctgcagagtagcagctgcctccaggatgagttacttgaaatttgccttgagtgtgttacctcctttccaagctcctcgtgataatgcagacttcctggagtacaaacacaggatttgtaattcctactgtaacggagtttagagccagggctgatgctttggtgtggccagcactctgaaactgagaaatgttcagaatgtacggaaagatgatcagctattttcaacataactgaaggcatatgctggcccataaacaccctgtaggttcttgatatttataataaaattggtgttttgt

SEQ ID NO: 415 - DNA, 3419 bp, Homo sapiens
tggcggcggcgcgacccggggaaccggcattgatgtccagctcgccgctgtccaagaaacgtcgcgtgtccgggcctgatccaaagccgggttctaactgctcccctgcccagtccgtgttgtccgaagtgccctcggtgccaaccaacggaatggccaagaacggcagtgaagcagacatagacgagggcctttactcccggcagctgtatgtgttgggccatgaggcaatgaagcggctccagacatccagtgtcctggtatcaggcctgcggggcctgggcgtggagatcgctaagaacatcatccttggtggggtcaaggctgttaccctacatgaccagggcactgcccagtgggctgatctttcctcccagttctacctgcgggaggaggacatcggtaaaaaccgggccgaggtatcacagccccgcctcgctgagctcaacagctatgtgcctgtcactgcctacactggacccctcgttgaggacttccttagtggtttccaggtggtggtgctcaccaacacccccctggaggaccagctgcgagtgggtgagttctgtcacaaccgtggcatcaagctggtggtggcaggcacgcggggcctgtttgggcagctcttctgtgactttggagaggaaatgatcctcacagattccaatggggagcagccactcagtgctatggtttctatggttaccaaggacaaccccggtgtggttacctgcctggatgaggcccgacacgggtttgagagcggggactttgtctccttttcagaagtacagggcatggttgaactcaacggaaatcagcccatggagatcaaagtcctgggtccttatacctttagcatctgtgacacctccaacttctccgactacatccgtggaggcatcgtcagtcaggtcaaagtacctaagaagattagctttaaatccttggtggcctcactggcagaacctgactttgtggtgacggacttcgccaagttttctcgccctgcccagctgcacattggcttccaggccctgcaccagttctgtgctcagcatggccggccacctcggccccgcaatgaggaggatgcagcagaactggtagccttagcacaggctgtgaatgctcgagccctgccagcagtgcagcaaaataacctggacgaggacctcatccggaagctggcatatgtggctgctggggatctggcacccataaacgccttcattgggggcctggctgcccaggaagtcatgaaggcctgctccgggaagttcatgcccatcatgcagtggctatactttgatgcccttgagtgtctccctcaggacaaagaggtcctcacagaggacaagtgcctccagcgccagaaccgttatgacgggcaagtggctgtgtttggctcagacctgcaagagaagctgggcaagcagaagtatttcctggtgggtgcgggggccattggctgtgagctgctcaagaactttgccatgattgggctgggctgcggggagggtggagaaatcatcgttacagacatggacaccattgagaagtcaaatctgaatcgacagtttcttttccggccctgggatgtcacgaagttaaagtctgacacggctgctgcagctgtgcgccaaatgaatccacatatccgggtgacaagccaccagaaccgtgtgggtcctgacacggagcgcatctatgatgacgattttttccaaaacctagatggcgtggccaatgccctggacaacgtggatgcccgcatgtacatggaccgccgctgtgtctactaccggaagccactgctggagtcaggcacactgggcaccaaaggcaatgtgcaggtggtgatccccttcctgacagagtcgtacagttccagccaggacccacctgagaagtccatccccatctgtaccctgaagaacttccctaatgccatcgagcacaccctgcagtgggctcgggatgagtttgaaggcctcttcaagcagccagcagaaaatgtcaaccagtacctcacagaccccaagtttgtggagcgaacactgcggctggcaggcactcagcccttggaggtgctggaggctgtgcagcgcagcctggtgctgcagcgaccacagacctgggctgactgcgtgacctgggcctgccaccactggcacacccagtactcgaacaacatccggcagctgctgcacaacttccctcctgaccagctcacaagctcaggagcgccgttctggtctgggcccaaacgctgtccacacccgctcacctttgatgtcaacaatcccctgcatctggactatgtgatggctgctgccaacctgtttgcccagacctacgggctgacaggctctcaggaccgagctgctgtggccacattcctgcagtctgtgcaggtccccgaattcacccccaagtctggcgtcaagatccatgtttctgaccaggagctgcagagcgccaatgcctctgttgatgacagtcgtctagaggagctcaaagccactctgcccagcccagacaagctccctggattcaagatgtaccccattgactttgagaaggatgatgacagcaactttcatatggatttcatcgtggctgcatccaacctccgggcagaaaactatgacattccttctgcagaccggcacaagagcaagctgattgcagggaagatcatcccagccattgccacgaccacagcagccgtggttggccttgtgtgtctggagctgtacaaggttgtgcaggggcaccgacagcttgactcctacaagaatggtttcctcaacttggccctgcctttctttggtttctctgaaccccttgccgcaccacgtcaccagtactataaccaagagtggacattgtgggatcgctttgaggtacaagggctgcagcctaatggtgaggagatgaccctcaaacagttcctcgactattttaagacagagcacaaattagagatcaccatgctgtcccagggcgtgtccatgctctattccttcttcatgccagctgccaagctcaaggaacggttggatcagccgatgacagagattgtgagccgtgtgtcgaagcgaaagctgggccgccacgtgcgggcgctggtgcttgagctgtgctgtaacgacgagagcggcgaggatgtcgaggttccctatgtccgatacaccatccgctgaccccgtctgctcctctaggctggccccttgtccacccctctccacaccccttccagcccagggttcccatttggcttctggcagtggcccaactagccaagtctggtgttccctcatcatccccctacctgaacccctcttgccactgccttctaccttgtttgaaacctgaatcctaataaagaattaataactcccaaaaaaaaaaaa

SEQ ID NO: 416 - DNA, 2415 bp, Homo sapiens
ggggagggcgcgggaggcggaggatgccgccgcggctgctgccgccgccgccacccgcgggtccccggcgaccctactccagacccgaggatggagccggcgctgggcgctgcagctgctcccggcgcgtccccgaccaggtagctggtgtcacttcggtgtggttggaagaagactttctccccagctgcattcccggaggcgccctttcgacctggaggccgggtctgctggccacagggctgccgcactggctgggactgccagctgggcctggagacgctggtggctgtggactccccagcttggagcagtccctctttgacctcaccccttggagaagcagccccatgaaggtgcccagccatgcaatgttcctggaaggccgtcctcctccttgccctggcctccattgccatccagtacacggccatccgcaccttcaccgccaagtcctttcacacctgccccgggctggcagaggccgggctggccgagcgactgtgcgaggagagccccaccttcgcctacaacctctcccgcaagacccacatcctcatcctggccaccacgcgcagcggctcctccttcgtgggccagctcttcaaccagcacctggacgtcttctacctgtttgagcccctctaccacgtccagaacacgctcatcccccgcttcacccagggcaagagcccggccgaccggcgggtcatgctaggcgccagccgcgacctcctgcggagcctctacgactgcgacctctacttcctggagaactacatcaagccgccgccggtcaaccacaccaccgacaggatcttccgccgcggggccagccgggtcctctgctcccggcctgtgtgcgaccctccggggccagccgacctggtcctggaggagggggactgtgtgcgcaagtgcgggctactcaacctgaccgtggcggccgaggcgtgccgcgagcgcagccacgtggccatcaagacggtgcgcgtgcccgaggtgaacgacctgcgcgccctggtggaagacccgcgattaaacctcaaggtcatccagctggtccgagacccccgcggcattctggcttcgcgcagcgagaccttccgcgacacgtaccggctctggcggctctggtacggcaccgggaggaaaccctacaacctggacgtgacgcagctgaccacggtgtgcgaggacttctccaactccgtgtccaccggcctcatgcggcccccgtggctcaagggcaagtacatgttggtgcgctacgaggacctggctcggaaccctatgaagaagaccgaggagatctacgggttcctgggcatcccgctggacagccacgtggcccgctggatccagaacaacacgcggggcgaccccaccctgggcaagcacaaatacggcaccgtgcgaaactcggcggccacggccgagaagtggcgcttccgcctctcctacgacatcgtggcctttgcccagaacgcctgccagcaggtgctggcccagctgggctacaagatcgccgcctcggaggaggagctgaagaacccctcggtcagcctggtggaggagcgggacttccgccccttctcgtgacccgggcggtgcgggtgggggcgggaggcgcaaggtgtcggttttgataaaatggaccgtttttaactgttgccttattaacccctccctctcccacctcatcttcgtgtccttcctgcccccagctcaccccactcccttctgccccttttttgtctctgaaatttgcactacgtcttggacgggaatcactggggcagagggcgcctgaagtagggtcccgccccccccaccccattcagacacatggatgttgggtctctgtgcggacggtgacaatgtttacaagcaccacatttacacatccacacacgcacacgggcactcgcgaggcgacttctcaagcttttgaatgggtgagtggtcgggtatctagtttttgcactgtcttactattcaaggtaagaggatacaaacaagaggaccacttgtctctaatttatgaatggtgtccatcctttccccatccctgcctcctgcccctgacgcccatttccccccttagagcagcgaaactgccccctcctgcccgcccttgcctgtcggtgaggcaggtttttactgtgaggtgaacgtggacctgtttctgtttccagtctgtggtgatgctgtctgtctgtctgagtctcgtggccgcccctggaccagtgatgactgatgaatcttatgagcttctgattgatctcggggtccatctgtgatatttctttgtgccaaaaagaaaaaaaaagagtggatcagtttgctaaatgaacattgaaattgaaatgctttatctgtgttttctgtaaataaaagagtgcaataatcacc

SEQ ID NO: 417 - DNA, 818 bp, Homo sapiens
cgcagcgggtcctctctatctagctccagcctctcgcctgcgccccactccccgcgtcccgcgtcctagccgaccatggccgggcccctgcgcgccccgctgctcctgctggccatcctggccgtggccctggccgtgagccccgcggccggctccagtcccggcaagccgccgcgcctggtgggaggccccatggacgccagcgtggaggaggagggtgtgcggcgtgcactggactttgccgtcggcgagtacaacaaagccagcaacgacatgtaccacagccgcgcgctgcaggtggtgcgcgcccgcaagcagatcgtagctggggtgaactacttcttggacgtggagctgggccgaaccacgtgtaccaagacccagcccaacttggacaactgccccttccatgaccagccacatctgaaaaggaaagcattctgctctttccagatctacgctgtgccttggcagggcacaatgaccttgtcgaaatccacctgtcaggacgcctaggggtctgtaccgggctggcctgtgcctatcacctcttatgcacacctcccaccccctgtattcccacccctggactggtggcccctgccttggggaaggtctccccatgtgcctgcaccaggagacagacagagaaggcagcaggcggcctttgttgctcagcaaggggctctgccctccctccttccttcttgcttctcatagccccggtgtgcggtgcatacacccccacctcctgcaataaaatagtagcatcggcaaaaaaaaaaaaaaaaaaaaaaaaaaaaaaaaaaaaaaaaaaa

SEQ ID NO: 418 - DNA, 2982 bp, Homo sapiens
cacaccctggtcggttttgctcacgtgcttcgggtcggttggattcagttcctccatgtggggccgtgggatgtcaccaccctttgccactgtccttgcaggccgggcgcccaggcgtgtggacccgagcccagccttgcgtctttcctcccagttggtaccaggggccttgtgcctccactcatgcagagtggaccagccgcctctgaagcagccccggggagaggagtgccaggcacacagactcaggaagctgggggtgtcagggcaccaggagcctctcaagcggtcctgttggccgtctttctgaagggcagctggggttgcatcatttccccaagtggatcctgccaactttctggggcttctggatgagagccctctccccaccccacccacccctccccgcattgtggcatcagtgctgctgcttccagggagccttcctggccatccaagcctcctctccaggttcctgccctgctgtagtccccaggccagtgcttggcaggtgctcagggaatgtatccaccaaccaaggtttggggtggctgtctctgcctgaccactttccccaggcccctggcgggtacctgagctgtgctctcagggcctcaggaacctccttccatattcagggcctgtgcctggggaggcttcagggtgtagcagctgtgcccatcccaggctgacccacccagcttgcctggtagcccagcctctgggctagtgtgccgtggggcaggggatgtgctgtagcctggtgcagagtccccaaccccagaagggggccatggaagctgacaccccaagtggccgcccccctgctctgtcttgcttcggacactgtggccgggtccaggatcctggcatcctgggaggtctctggctttgtgggcagcctgcctggcccgcacagtctgcctgtcctgagggtgagacacaggtcaagcccacagacccccttgctcccctgctggggcctccaggctcacagaccaccccaccctaccctgtccttgcccaagcaaatgagaggcaggggcttcccgggctgctgctgtcccgccctctgtggggcaggaggaggtgcccacagaggctgggtggtgatagccaggagatgggctggcatctgcattacccaagctctgctgcccatggtggcctttctgggggtgggtgctggtccctgccccctgccccacccctgatgtctgctccagagacaaaggtggggagggtgctgaagaggaagtgtttgcccagggagaggctgcggctcctcctgaaacatcagccctgtgggtcctgtttgcagaatctccggcctgtgaaactgtgaggggattcagccaagacgtcctcttccctctgcctcccacccaggccactcttcacctccaccatgagcctggacatccagagcctggacatccagtgtgaggagctgagcgacgctagatgggccgagctcctccctctgctccagcagtgccaagtggtcaggctggacgactgtggcctcacggaagcacggtgcaaggacatcagctctgcacttcgagtcaaccctgcactggcagagctcaacctgcgcagcaacgagctgggcgatgtcggcgtgcattgcgtgctccagggcctgcagaccccctcctgcaagatccagaagctgagcctccagaactgctgcctgacgggggccggctgcggggtcctgtccagcacactacgcaccctgcccaccctgcaggagctgcacctcagcgacaacctcttgggggatgcgggcctgcagctgctctgcgaaggactcctggacccccagtgccgcctggaaaagctgcagctggagtattgcagcctctcggctgccagctgcgagcccctggcctccgtgctcagggccaagccggacttcaaggagctcacggttagcaacaacgacatcaatgaggctggcgtccgtgtgctatgccagggcctgaaggactccccctgccagctggaggcgctcaagctggagagctgcggtgtgacatcagacaactgccgggacctgtgcggcattgtggcctccaaggcctcgctgcgggagctggccctgggcagcaacaagctgggtgatgtgggcatggcggagctgtgcccagggctgctccaccccagctccaggctcaggaccctgtggatctgggagtgtggcatcactgccaagggctgcggggatctgtgccgtgtcctcagggccaaggagagcctgaaggagctcagcctggccggcaacgagctgggggatgagggtgcccgactgctgtgtgagaccctgctggaacctggctgccagctggagtcgctgtgggtgaagtcctgcagcttcacagccgcctgctgctcccacttcagctcagtgctggcccagaacaggtttctcctggagctacagataagcaacaacaggctggaggatgcgggcgtgcgggagctgtgccagggcctgggccagcctggctctgtgctgcgggtgctctggttggccgactgcgatgtgagtgacagcagctgcagcagcctcgccgcaaccctgttggccaaccacagcctgcgtgagctggacctcagcaacaactgcctgggggacgcgggcatcctgcagctggtggagagcgtccggcagccgggctgcctcctggagcagctggtcctgtacgacatttactggtctgaggagatggaggaccggctgcaggccctggagaaggacaagccatccctgagggtcatctcctgaggctcttcctgctgctgctctccctggacgaccggcctcgaggcaaccctggggcccaccagcccctgccatgctctcaccctgcatatcctaggtttgaagagaaacgctcagatccgcttatttctgccagtatattttggacactttataatcattaaagcactttcttggcaggaaaaaaaaaa

SEQ ID NO: 419 - DNA, 815 bp, Homo sapiens
caacaaaaaagagcctcaggatccagcacacattatcacaaacttagtgtccatccatcactgctgaccctctccggacctgactccacccctgaggacacaggtcagccttgaccaatgacttttaagtaccatggagaacagggggccagaacttcggcagtaaagaataaaaggccagacagagaggcagcagcacatatctgcttccgacacagctgcaatcactagcaagctctcaggcctggcatcatggtgcattttactgctgaggagaaggctgccgtcactagcctgtggagcaagatgaatgtggaagaggctggaggtgaagccttgggcagactcctcgttgtttacccctggacccagagattttttgacagctttggaaacctgtcgtctccctctgccatcctgggcaaccccaaggtcaaggcccatggcaagaaggtgctgacttcctttggagatgctattaaaaacatggacaacctcaagcccgcctttgctaagctgagtgagctgcactgtgacaagctgcatgtggatcctgagaacttcaagctcctgggtaacgtgatggtgattattctggctactcactttggcaaggagttcacccctgaagtgcaggctgcctggcagaagctggtgtctgctgtcgccattgccctggcccataagtaccactgagttctcttccagtttgcaggtcttcctgtgaccctgacaccctccttctgcacatggggactgggcttggccttgagagaaagccttctgtttaataaagtacattttcttcagtaatc

SEQ ID NO: 420 - DNA, 3385 bp, Homo sapiens
cgtgtttcggccgccgccatggccgcggtggacctggagaagctgcgggcgtcgggcgcgggcaaggccatcggcgtcctgaccagcggcggcgacgcgcaaggtcccctgacaagcccaccaggccccctgctgagatggctgtgaccctgggctgacccgcccagtggcacattgactccgcctggagctggggagaccagagaggccctgtggttggacggtggcctgggtgcgctgctcctgccctctccttgccctgcctcagctgctgcctgccagaggcgtggcacctcacctcacacctgctccctgctgctgagccccacgccaagctggagagcggatgagaagcatgtgtaaccagggtagaggtcgagagtcctctcgtgggggtctccatgttcaagggagctgccgaggcttgagcaggagcccccagcaggaaactggctttgccaaggcccccgctgggacagactgtttctttcactgcagtcctgggagccgagggcaaggggacaggaaagaggaagtgacctcagagcctggtggcaccagcatcatgtccaggctggggggcatgaacgctgctgtccgggctgtgacgcgcatgggcatttatgtgggtgccaaagtcttcctcatctacgagggctatgagggcctcgtggagggaggtgagaacatcaagcaggccaactggctgagcgtctccaacatcatccagctgggcggcactatcattggcagcgctcgctgcaaggcctttaccaccagggaggggcgccgggcagcggcctacaacctggtccagcacggcatcaccaacctgtgcgtcatcggcggggatggcagccttacaggtgccaacatcttccgcagcgagtggggcagcctgctggaggagctggtggcggaaggtaagatctcagagactacagcccggacctactcgcacctgaacatcgcgggcctagtgggctccatcgataacgacttctgcggcaccgacatgaccatcggcacggactcggccctccaccgcatcatggaggtcatcgatgccatcaccaccactgcccagagccaccagaggaccttcgtgctggaagtgatgggccggcactgcgggtacctggcgctggtatctgcactggcctcaggggccgactggctgttcatccccgaggctccacccgaggacggctgggagaacttcatgtgtgagaggctgggtgagactcggagccgtgggtcccgactgaacatcatcatcatcgctgagggtgccattgaccgcaacgggaagcccatctcgtccagctacgtgaaggacctggtggttcagaggctgggcttcgacacccgtgtaactgtgctgggccacgtgcagcggggagggacgccctctgccttcgaccggatcctgagcagcaagatgggcatggaggcggtgatggcgctgctggaagccacgcctgacacgccggcctgcgtggtcaccctctcggggaaccagtcagtgcggctgcccctcatggagtgcgtgcagatgaccaaggaagtgcagaaagccatggatgacaagaggtttgacgaggccacccagctccgtggtgggagcttcgagaacaactggaacatttacaagctcctcgcccaccagaagccccccaaggagaagtctaacttctccctggccatcctgaatgtgggggccccggcggctggcatgaatgcggccgtgcgctcggcggtgcggaccggcatctcccatggacacacagtatacgtggtgcacgatggcttcgaaggcctagccaagggtcaggtgcaagaagtaggctggcacgacgtggccggctggttggggcgtggtggctccatgctggggaccaagaggaccctgcccaagggccagctggagtccattgtggagaacatccgcatctatggtattcacgccctgctggtggtcggtgggtttgaggcctatgaaggggtgctgcagctggtggaggctcgcgggcgctacgaggagctctgcatcgtcatgtgtgtcatcccagccaccatcagcaacaacgtccctggcaccgacttcagcctgggctccgacactgctgtaaatgccgccatggagagctgtgaccgcatcaaacagtctgcctcggggaccaagcgccgtgtgttcatcgtggagaccatggggggttactgtggctacctggccaccgtgactggcattgctgtgggggccgacgccgcctacgtcttcgaggaccctttcaacatccacgacttaaaggtcaacgtggagcacatgacggagaagatgaagacagacattcagaggggcctggtgctgcggaacgagaagtgccatgactactacaccacggagttcctgtacaacctgtactcatcagagggcaagggcgtcttcgactgcaggaccaatgtcctgggccacctgcagcagggtggcgctccaaccccctttgaccggaactatgggaccaagctgggggtgaaggccatgctgtggttgtcggagaagctgcgcgaggtttaccgcaagggacgggtgttcgccaatgccccagactcggcctgcgtgatcggcctgaagaagaaggcggtggccttcagccccgtcactgagctcaagaaagacactgatttcgagcaccgcatgccacgggagcagtggtggctgagcctgcggctcatgctgaagatgctggcacaataccgcatcagtatggccgcctacgtgtcaggggagctggagcacgtgacccgccgcaccctgagcatggacaagggcttctgaggccagccatgcccacgcccctccccagcccccacccatgccagcgcagcgccagggctcagatggggcctgggctgttgtgtctggagcctgcaggcaggtgggggctgcgtccctgctcagcccatcccctgcctctatccctggccacctgccaggcctccctccggctggtgtcttgagaccagcctgccaggccctccagcaggaggacagagtgccctggggcatccaccttcctgcccaggggacgtggcgctgtcggtgtttggaggctgctgccccctggctttggcgccccatgggccctcagcgtctccccatgctgggctcactacatgggccagcccttgctctacctggccggtaggctgctggcgcctaggttgtgttgagagggggatgcccctggccctgcctcactgtgacctgctcctgcccacgtgcagcacctgtcaccttttctagaaataaaatcaccctgactgtggggtgcatcggtctccggaaaaaaaaaaaaaaaaaaaaaaaaaaaaaaaaaaaaaa

SEQ ID NO: 421 - DNA, 2039 bp, Homo sapiens
cggaagcgcccgcagcccggtaccggctcctcctgggctccctctagcgccttccccccggcccgactccgctggtcagcgccaagtgacttacgcccccgaccctgagcccggaccgctaggcgaggaggatcagatctccgctcgagaatctgaaggtgccctggtcctggaggagttccgtcccagcccgcggtctcccggtactgtcgggccccggccctctggagcttcaggaggcggccgtcagggtcggggagtatttgggtccggggtctcagggaagggcggcgcctgggtctgcggtatcggaaagagcctgctggagccaagtagccctccctctcttgggacagacccctcggtcccatgtccatgggggcaccgcggtccctcctcctggccctggctgctggcctggccgttgcccgtccgcccaacatcgtgctgatctttgccgacgacctcggctatggggacctgggctgctatgggcaccccagctctaccactcccaacctggaccagctggcggcgggagggctgcggttcacagacttctacgtgcctgtgtctctgtgcacaccctctagggccgccctcctgaccggccggctcccggttcggatgggcatgtaccctggcgtcctggtgcccagctcccgggggggcctgcccctggaggaggtgaccgtggccgaagtcctggctgcccgaggctacctcacaggaatggccggcaagtggcaccttggggtggggcctgagggggccttcctgcccccccatcagggcttccatcgatttctaggcatcccgtactcccacgaccagggcccctgccagaacctgacctgcttcccgccggccactccttgcgacggtggctgtgaccagggcctggtccccatcccactgttggccaacctgtccgtggaggcgcagcccccctggctgcccggactagaggcccgctacatggctttcgcccatgacctcatggccgacgcccagcgccaggatcgccccttcttcctgtactatgcctctcaccacacccactaccctcagttcagtgggcagagctttgcagagcgttcaggccgcgggccatttggggactccctgatggagctggatgcagctgtggggaccctgatgacagccataggggacctggggctgcttgaagagacgctggtcatcttcactgcagacaatggacctgagaccatgcgtatgtcccgaggcggctgctccggtctcttgcggtgtggaaagggaacgacctacgagggcggtgtccgagagcctgccttggccttctggccaggtcatatcgctcccggcgtgacccacgagctggccagctccctggacctgctgcctaccctggcagccctggctggggccccactgcccaatgtcaccttggatggctttgacctcagccccctgctgctgggcacaggcaagagccctcggcagtctctcttcttctacccgtcctacccagacgaggtccgtggggtttttgctgtgcggactggaaagtacaaggctcacttcttcacccagggctctgcccacagtgataccactgcagaccctgcctgccacgcctccagctctctgactgctcatgagcccccgctgctctatgacctgtccaaggaccctggtgagaactacaacctgctggggggtgtggccggggccaccccagaggtgctgcaagccctgaaacagcttcagctgctcaaggcccagttagacgcagctgtgaccttcggccccagccaggtggcccggggcgaggaccccgccctgcagatctgctgtcatcctggctgcaccccccgcccagcttgctgccattgcccagatccccatgcctgagggcccctcggctggcctgggcatgtgatggctcctcactgggagcctgtgggggaggctcaggtgtctggagggggtttgtgcctgataacgtaataacaccagtggagacttgcacatctgaaaaaaaaaaaaaaaaa

SEQ ID NO: 422 - DNA, 1507 bp, Homo sapiens
ctcgaggccacgaaggccccgacaccatgtcctgccgggatcggacccaggagtttctgtctgcctgcaagtcgctgcagacccgtcagaatggaatccagacaaataagccagctttgcgtgctgtccgacaacgcagtgaattcaccctcatggccaagcgcattgggaaagaccttagcaacacatttgccaagctggagaagctgacaatcttggcaaagcgcaagtccctctttgatgataaagcagtggaaattgaagagctaacatatatcatcaaacaggacatcaatagcctcaacaaacaaattgctcagctccaggatttcgtgagagccaagggcagccagagtggccggcacctgcagacccactccaacaccattgtggtctccttgcagtcgaaactggcttctatgtccaatgacttcaaatcggttttagaagtgaggacagagaacctgaagcagcagaggagccggagagagcagttctcccgggcacctgtgtcagccctgccccttgcccctaaccacctgggcggtggtgctgtggttctgggggcagagtcccatgcctccaaggatgtcgccatcgacatgatggactctcggaccagccagcagctgcagctcattgacgagcaggattcctacatccagagtcgggcagacaccatgcagaacattgagtcgacaattgttgagttgggctccatctttcagcagttggcacacatggttaaggaacaggaggaaaccattcagaggatcgacgagaacgtgctaggagcccagctggacgttgaggccgcccattcagagatcctcaagtacttccagtctgtcacctccaaccggtggctcatggtcaaaatcttcctcatcctcattgtcttcttcatcatctttgtggtcttccttgcttgaaccctctctactctgaggcactctgttggggtttgggaccctcctgggaaggcaagtggccagtgctgccactgagcctgtgcagggtacttgggagaaaggccctgtttccctggaactgctaagaatgaccactgcccctgatcccccaccccttgcctctggccaccctgtcctccccccaccaccctcaggcctatgaaacacacagggttctagatttgaactctgctgtgaagtgactggaagggagcagaggccagctgggggccagtgggggaggttgtttccactaggagatttttataaaccctctccagcctctcccggaaaggaagcgttggcagcaaagggagatgatgcccttacccaccttcctgtgagtgaagagaggaagcagccccagggaccaattttcccaattgacctctttcttcctctttcaccatgtgaggcagggagccctgagcccttcagctgcctgcacaacccctgacattggctgctggtgactcaatctgccaaatgtgctgcagctcgttttctcccaattacagcaagactgtcagcctcca

SEQ ID NO: 423 - DNA, 2481 bp, Homo sapiens
tttttttcctctaggcagagaagaggcgatggcggcgatggcatctctcggcgccctggcgctgctcctgctgtccagcctctcccgctgctcaggtagcggcccagccggggcttctttcttgcgagcctctgacccacggcaggtggtgttgggggcaggagggatgcgggggtccggcctttcagggtccgtcgctgcgggccgggccttcccccgagaggcaggcggccttgggacggggggaccaaagcacctcgcgcacgtttaccggcagccaggcttttccttgtctgcccatacgaagaggagtccccgagcctccatggtgcgcccggcccccaagctgcagcacggaacgtgacacatgtcccggctcccgctccctgcggggtcggaccggagcgaagctctgtagcgctgagcgatcgcggccaaaaacggggctggaggagccacataagctaggaagggacctcagtgaggagagggagcaagagcggggcgagttagatggggagccaaaggtgcgcagggccttgagtgccaggccgaagactggcttttccggagggccctgccttacccttaccagagttttcggcagagccgaccaggggtcccgtcgatttgcattcgtgaggggctgaggtctgaactccagagtgtgtttaggaggtggctgcagcagccagccccgggcccgggggccaggactggacaggggcggctttctccacattcccttttctgccgtccttcaggccagtagccttgctgcctgcaacgttttggcagcctaactggcctccctttccgcacactcctcatctgcccctcaggaattccctgaactatagtcagggacgtatccagaggacaagcctggccataaaacccttcgggggctcccctgcgccacaggaagcaggcccaacttaggcaggacacagaagggctggcgggatctagcccctgagaactgcctccacgctgttcctagggatctgcctcctgtggtccagacccagagccttctctgacgtcctctgctgaagccatcgttctgccagggcaccacatttggacagcgggtggctgagaacattcccactttggggagcctttgtttcacaccctctgatgtaggcggcagccttcctttcctttgggcctctggttatggagaaggctaaggcaaggtcctttctctcacagctaacaagttgtgcttctggaaccagagtctctcccgtttacttcttcaggaaacgctggggccagtcttcaccttctgtcaactggccgggggcagagaccctttctctcatcttgaaagccccagtgcattgcctgcctgcagcccccacccccgatgtctctgctgaggatgccttcagtaactcgtccaggccgtttgtggctctgaattgaggctggcgtggcccccgggcctccgtgtcataggtccaagtgttggcatgtattgtccagtgaatccagcccccacctgtccccagttcgctcttcctgcacacctccagaaagccggccttgcccctccccagccttccttcacagccatcccgcctacgttgccattgcatttgtgaccgagcacttggatctgtctcgcatatcccacctggaaggggcaggaagagcgcatgggtccccagctgatccgtgctatgaggcagggccgggccatcctgccctcagaccgggatactcgagctggccttacccaggcatctctccctcttccccgcagccgaggcctgcctggagccccagatcaccccttcctactacaccacttctgacgctgtcatttccactgagaccgtcttcattgtggagatctccctgacatgcaagaacagggtccagaacatggctctctatgctgacgtcggtggagaacaattccctgtcactcgaggccaggatgtggggcgttatcaggtgtcctggagcctggaccacaagagcgcccacgcaggcacctatgaggttagattcttcgacgaggagtcctacagcctcctcaggaaggctcagaggaataacgaggacatttccatcatcccgcctctgtttacagtcagcgtggaccatcgggtgagtggcctggtccctcctcctttttggggttgttgggctgagtgaaggttatcctctccacagccccagctctgctgctgggccgtgattggccagcatgtcttggttcccctggcggaaggtgaccagggctggctggtctgctcacctgtactcccctgagctggcttgtgatctcctttttttcagggcacttggaacgggccctgggtgtccactgaggtgctggctgcggcgatcggccttgtgatctactacttggccttcagtgcgaagagccacatccaggcctgagggcggcaccccagccctgcccttgcttccttcaataaacatcacaggacctgggactgc

SEQ ID NO: 424 - DNA, 1296 bp, Homo sapiens
agttacagacagctgaccatggaagcgaatgggttgggacctcagggttttccggagctgaagaatgacacattcctgcgagcagcctggggagaggaaacagactacactcccgtttggtgcatgcgccaggcaggccgttacttaccagagtttagggaaacccgggctgcccaggactttttcagcacgtgtcgctctcctgaggcctgctgtgaactgactctgcagccactgcgtcgcttccttctggatgctgccatcattttctccgacatccttgttgtaccccaggcactgggcatggaggtgaccatggtacctggcaaaggacccagcttcccagagccattaagagaagagcaggacctagaacgcctacgggatccagaagtggtagcctctgagctaggctatgtgttccaagccatcacccttacccgacaacgactggctggacgtgtgccgctgattggctttgctggtgccccatggaccctgatgacatacatggttgagggtggtggctcaagcaccatggctcaggccaagcgctggctctatcagagacctcaggctagtcaccagctgcttcgcatcctcactgatgctctggtcccatatctggtaggacaagtggtggctggtgcccaggcattgcagctgtttgagtcccatgcagggcatcttggcccacagctcttcaacaagtttgcactgccttacatccgtgatgtggccaagcaagtgaaggccaggttgcgggaggcaggcctggcaccagtgcccatgatcatctttgctaaggatgggcattttgccctggaggagctggcccaagctggctatgaggtggttgggcttgactggacagtggccccaaagaaagcccgggagtgtgtggggaagacggtgacattgcagggcaacctggacccctgtgccttgtatgcatctgaggaggagatcgggcagttggtgaagcagatgctggatgactttggaccacatcgctacattgccaacttgggccatgggctttatcctgacatggacccagaacatgtgggcgcctttgtggatgctgtgcataaacactcacgtctgcttcgacagaactgaccgtatacctttaccctcaagtaccactaacacagatgattgatcgtttccaggacaataaaagtttcggagttgaacctattgtgtagttttgtttgtgaaagattgtcccatatcctcagttcttcttagcctctgtctccttccctgggaccctctcatatcctcttatag

SEQ ID NO: 425 - DNA, 2785 bp, Homo sapiens
ggcacgaggcagccgccgagcggccgcgatttcccggggactgctggggcgcagcggggaggcgggccggggggcggcggggcgcgagcagagcgcggttgacctccctttctctgctcagctccagcgtcatttcggcctcttagttcttctgaaccctgctcctgagctaggtaggaaacatgagcggcaccaacttggatgggaacgatgagtttgatgagcagttgcgaatgcaagaattgtacggagacggcaaggatggtgacacccagaccgatgccggcggagaacccgattctctcgggcagcagccgacggacactccctacgagtgggacctggacaaaaaggcttggttccccaagattactgaagatttcattgctacatatcaggccaattatggcttctctaacgatggcgcatctagttctaccgcaaatgttgaagatgtccatgctaggactgcagaggaacctccacaagaaaaagccccggaacccactgatgccagaaagaagggagaaaaaagaaaggctgagtcaggatggtttcatgttgaagaagacagaaatacaaatgtatacgtgtctggtttgcctccagatattacagtggatgaatttatacaacttatgtccaagtttggcattattatgagagatcctcagacagaagaatttaaggtcaaactttacaaagataatcaaggaaatcttaaaggagacggtctttgctgttatttgaaaagagaatctgtggaacttgcattaaaacttttggatgaagatgaaattagaggctacaaattacatgttgaggtggcaaagtttcaactgaagggagaatatgatgcctcaaagaagaagaagaagtgcaaagactataagaagaagctgtctatgcaacaaaagcagttggattggagacctgagaggcgagccggaccatcccggatgcgccatgagcgagttgtcatcatcaagaatatgtttcatcctatggattttgaggatgatccgttggtgctgaatgagatcagagaagaccttcgagtagagtgttcgaagtttggacaaattaggaaactccttctctttgataggcacccagatggtgtggcctctgtgtcctttcgggatccagaggaagctgattattgtattcagactctcgatggaagatggtttggtggccgtcaaatcactgcccaggcatgggatgggactacagattatcaggtggaggaaacctcaagagaaagggaggaaaggctgagaggatgggaggctttcctcaatgctcctgaggccaacagaggccttaggcgttcagattctgtctctgcttccgaaagggcagggccttctagagcaaggcatttttcagagcaccccagcacatctaaaatgaatgctcaagaaactgcaactggaatggcgtttgaagaacctatagatgagaagaagtttgaaaagacagaagatgggggagaatttgaagaaggtgcttctgaaaacaatgctaaggaaagtagccccgaaaaagaggctgaagaaggctgccctgaaaaagaatctgaagagggctgccccaaaagagggtttgaaggcagctgctcccaaaaagagtctgaagaaggcaatcccgtaagaggatctgaagaggatagtcctaaaaaagagtctaaaaagaagacactcaaaaatgattgtgaagagaatggccttgcaaaggaatctgaagatgacctcaacaaggagtctgaagaggaggttggccccacaaaagagtccgaagaagatgactcagagaaagagtctgatgaagactgctctgaaaaacagtctgaagatggctccgaaagagaatttgaagaaaatggtctcgagaaagatttggacgaggaaggttctgaaaaggagcttcatgaaaatgttcttgacaaagagttagaagaaaatgactctgaaaactccgaatttgaagatgacggctctgaaaaagtgttagatgaggaaggctctgagagagagtttgacgaagattcagatgaaaaggaagaagaggaggatacatatgaaaaagtatttgatgatgagtctgatgagaaagaggatgaagaatatgcagatgaaaaggggcttgaagctgctgataaaaaggcggaagaaggtgatgcagatgaaaagctgtttgaagagtcagatgacaaggaagatgaagatgcagatggaaaggaagttgaagatgctgacgaaaagttgttcgaagatgatgattccaatgagaagttgtttgatgaggaggaagattccagtgagaagttgtttgacgattctgatgagagggggactttgggtggttttgggagtgttgaagaagggcccctatccactggcagcagctttattctcagtagcgatgatgatgacgatgatatttaatcccttaaacttgctttttagggagagtcctccatctacatttgcctgtgcttcagggtaattactagtagtgttacatgaacatgtgcatagtggtaggatgccatcagattaaagcattgaagtgtttcattgttacctgtacctaatggttttaaatatatgttaattgattgtttagttaaaatgtcatagttacaatgcaagtaaactggatacttgttcttttgtcagatttgttaaatgcatgcagaataatatttttaagagtattgattgaagtttgtgatattcatcaataaaaatgagttgataataaaaaaaaaaaaaaaaaa

SEQ ID NO: 426 - DNA, 1021 bp, Homo sapiens
cgggaagcgccgggcgagcccactgtgcggccgtcgtgggggaagcgaaggttcctgattccacctacctcctaagtgaaggcttccgtccctggagaggaggcggcgccctgtatcggccttcgtcctccgcgggtgtgctagcgttgggacggtcctttgttgccgcgaggggtaggagtgggcgtggcggagccagctccgttcggaacactcccgggccgacccgactcgctcatcctgcaggagctgcggcgccaagatgagtggagaggagaacccagccagcaagcccacgccggtgcaggacgtacagggcgacgggcgctggatgtccctgcaccatcggttcgtggctgacagcaaagataaggaacccgaagtcgtcttcatcggggactccttggtccagctcatgcaccagtgcgagatctggcgcgagctcttctctcctctgcatgcacttaactttggcattggtggtgacggcacacagcatgtactgtggcggctggagaatggggagctggaacacatccggcccaagattgtggtggtctgggtgggcaccaacaaccacggacacacagcagagcaggtgactggtggcatcaaggccattgtgcaactggtgaatgagcgacagccccaggcccgggttgtggtgctgggcctgcttccgcgaggccaacatcccaacccacttcgggagaagaaccgacaggtgaacgagctggtacgggcggcactggctggccaccctcgggcccacttcctagatgccgaccctggctttgtgcactcagatggcaccatcagccatcatgacatgtatgattacctgcatctgagccgcctgggctacacacctgtttgccgggctctgcactccctgcttctgcgtctgctggcccaagaccagggccaaggtgctcccctgctggagcccgcaccctaagcatcctgctgccttcccacaacattaaactctccttcctcagtgaaaaaaaaaaaaaaaaaa

SEQ ID NO: 427 - DNA, 1771 bp, Homo sapiens; identical to SEQ ID NO: 179

SEQ ID NO: 428 - DNA, 2675 bp, Homo sapiens
ttttcttcttttttattcacacggggcccatgaccccaggatacagctgaggcgagccaggcataggccaggttgtggcatgaatgtcccctcacagccccacgctggcctcttaacagcgcaggcctctgtgtcctctgtcagaaatgtcctgtcccctccctgagctgagctcaggctgggtgtgtcaccccctctccaccatcttccaggcccttcccagctccagctgtgcccttttcttttttttgagacggagtcttgctctgtcgcccaggctggagtgcagctgtgcaatctgggctcactgcaagctccgcctcccgggttcacgccattctcttgcctcagcctcccgagtagctgggactatagacgcccgccaccacgccggctaattttttgtactttttagtagagatgtggtttcaccatgttagccaggatggtctcgacctcctgacctcgtgatccgcctgcctcggactcccaaagtgctgggattacaggcgtgagccaccgcgcccggcccggctgtgccctctgtgccgggtgcagacccccgtcctgagcctactcctctgccaccattgtttctctgccagccgcctctgtccaccacacgctggcagagggccggccaggtgctgtgggatgcagctggaggccttgaaggccggtgggatcgtcccagtgcgtgaggagaggctcctgctccctcaggtggggacaagacacggggggacccggatcccagccctgccggccgccgcaggcgtgcaggagaggcctcgcgctccagacgggctgtggcctggtgtcggcacacccactgtcctcccgcctggctacagctgctggtgcgggccctcttgtcccttagagtcacctggcacatctgtcatccaccggtgcctgctggactcccccgcagaccagaccaggtggatttcaccactcacatgcccaaggcagccccgctctcctcggcagagttgcagggaccccggccttccctggggcctggggccagggcctgaggggcactctccgcttctgcctttgtattctttcaaggagaccaaagtgccttttctcgttatagaaaacttagaaaagtcacaagtagaaagaggcaaacgtcccgtaaggaacgcacgcccgcagacatcgtctgagctgattttctttctcccgcctgtgcgtggcctgagagtgtgaggttgagctgctcaccacgcggggcagggcgctgcgcctgctcttctgccccaggaggataccggcaactctgccctctgcagccgtcactggagggtccctgcagggagcaactgtggcatcagtgtttactcctgcgagtgacgcttggtgaacatctgtgtccctggcccagtgaggggaaaggcttctgtgctcagggtgacatccagatgccagatgtagggtccctgggcacccatcgcaggttcccgcagcagctggcgcccagaatcctctgggttctcacacccccacactagcgcccgcttccctgggcccagtggtctcaggcccctttgccagtgagggaagggtctgcggtggtcacccctggaggcggtgcggccgctctctgagagcgtccttgcccgttctaagagtgggggctcttcctgctccagccgatgtcagtctggtgtggcaggaggggcttgggtgggagccgtcctgggattgcagattgggccttggggcgccaggtggctgagtcctggcgctgtgtcctttcaggatggtggatgtggggggccagcggtcggagcggaggaagtggatccactgctttgagaacgtgacatccatcatgtttctcgtcgccctcagcgaatacgaccaagtcctggtggagtcggacaacgaggtgggccctgccctgagcaggggcagcgttgggggccgggccttccccacctgccaagcctgggtcccctcacctgggtccccccagctcccccttgggctgtgtgcagtggggagggcccctctgattcccgctgccttcgctcccgccagaaccggatggaggagagcaaagccctgttccggaccatcatcacctacccttggttccagaactcctccgtcatcctcttcctcaacaagaaggacctgctggaggacaagatcctgtactcgcacctggtggactacttccccgagttcgatggtccccagcgggacgcccaggcggcgcgggagttcatcctgaagatgttcgtggacctgaaccccgacagcgacaagatcatctactcacacttcacgtgtgccaccgacacggagaacatccgcttcgtgttcgcggccgtgaaggacaccatcctgcagcccaacctcaaggagtacaacctggtctgagcgcccaggcccagggagacgggatggagacacggggcaggaccttccttccacggagcctgcggctgccgggcgggtggcgctgccgagtccgggccggggcctctgcccgcgggaggagatttttttttttcatatttttaacaaatggtttttatttcacagttatcaggggatgtacatctctccctccgtacacttcgcgcaccttctcaccttttgtcaacggcaaaggcagcctttttctggccttgacttatggctcgcttttttct

SEQ ID NO: 429 - DNA, 2937 bp, Homo sapiens
acgcgtccgcttcggaatgagagactcaaccataatagaaagaatggagaactattaaccaccattcttcagtgggctgtgattttcagaggggaatactaagaaatggttttccatactggaacccaaaggtaaagacactcaaggacagacatttttggcagagcatagatgaaaatggcaagttccctggctttccttctgctcaactttcatgtctccctcttcttggtccagctgctcactccttgctcagctcagttttctgtgcttggaccctctgggcccatcctggccatggtgggtgaagacgctgatctgccctgtcacctgttcccgaccatgagtgcagagaccatggagctgaggtgggtgagttccagcctaaggcaggtggtgaacgtgtatgcagatggaaaggaagtggaagacaggcagagtgcaccatatcgagggagaacttcgattctgcgggatggcatcactgcagggaaggctgctctccgaatacacaacgtcacagcctctgacagtggaaagtacttgtgttatttccaagatggtgacttctacgaaaaagccctggtggagctgaaggttgcagcattgggttctgatcttcacattgaagtgaagggttatgaggatggagggatccatctggagtgcaggtccactggctggtacccccaaccccaaataaagtggagcgacaccaagggagagaacatcccggctgtggaagcacctgtggttgcagatggagtgggcctgtatgcagtagcagcatctgtgatcatgagaggcagctctggtgggggtgtatcctgcatcatcagaaattccctcctcggcctggaaaagacagccagcatatccatcgcagaccccttcttcaggagcgcccagccctggatcgcggccctggcagggaccctgcctatctcgttgctgcttctcgcaggagccagttacttcttgtggagacaacagaaggaaaaaattgctctgtccagggagacagaaagagagcgagagatgaaagaaatgggatacgctgcaacagagcaagaaataagcctaagagagaagctccaggaggaactcaagtggaggaaaatccagtacatggctcgtggagagaagtctttggcctatcatgaatggaaaatggccctcttcaaacctgcggatgtgattctggatccagacacggcaaacgccatcctccttgtttctgaggaccagaggagtgtgcagcgtgctgaagagccgcgggatctgccagacaaccctgagagatttgaatggcgttactgtgtccttggctgtgaaaacttcacatcagggagacattactgggaggtggaagtgggggacagaaaagagtggcatattggggtatgtagtaagaacgtggagaggaaaaaaggttgggtcaaaatgacaccggagaacggatactggactatgggcctgactgatgggaataagtatcgggctctcactgagcccagaaccaacctgaaacttcctgagcctcctaggaaagtggggatcttcctggactatgagactggagagatctcgttctataatgccacagatggatctcatatctacacctttccgcacgcctctttctctgagcctctatatcctgttttcagaattttgaccttggagcccactgccctgaccatttgcccaataccaaaagaagtagagagttcccccgatcctgacctagtgcctgatcattccctggagacaccactgaccccgggcttagctaatgaaagtggggagcctcaggctgaagtaacatctctgcttctccctgcccaccctggagctgaggtctccccttctgcaacaaccaatcagaaccataagctacaggcacgcactgaagcactttactgatattcattccattattccatatgacagttgttttgagtttcgtaccaccttattgtccccttatacagataaggaaactggggtgcagaaaggtgaattaactttacaaagtagacatgacaagtgaacagcagagctgggatctaaacagcaataactaacattaacagagaatttaaaatgttcttagtgctgtgttataagctttggtggatgtcactcctttaatcctcacaacaccctgtcgggtagtcatattttgcaagtatggaagctgaggcagggcaacatgaagtaacttacataattcatacagtaatttgtgcagttgggagatgttcagccttagtccctggctaattgcctgttcttttccagcctgattttttttcccacaggaagagcccacatgtagccctgaggtttccttcccaggacagctgcagggtagagatcattttaagtgcttgtggagttgacatccctattgactctttcccagctgatatcagagacttagacccagcactccttggattagctctgcagagtgtcttggttgagagaataacctcatagtaccaacatgacatgtgacttggaaagagactagaggccacacttgataaatcatggggcacagatatgttcccacccaacaaatgtgataagtgattgtgcagccagagccagccttccttcaatcaaggtttccaggcagagcaaataccctagagattctctgtgatataggaaatttggatcaaggaagctaaaagaattacagggatgtttttaatcccactatggactcagtctcctggaaataggtctgtccactcctggtcattggtggatgttaaacccatattcctttcaactgctgcctgctagggaaaactgctcctcattatcatcactattattgctcaccactgtatcccctctacttggcaagtggttgtcaagttctagttgttcaataaatgtgttaataatgaaaaaaaaaaa

SEQ ID NO: 430 - DNA, 2560 bp, Homo sapiens
ggcacgaggggccaccgaggcgctgtccctgaccaccagcacgagacccctttctatcgcgccagtcctgtggtctccgcacctctccagctcctgcacccccggcccccgtggttcccagccgcacagtagcgtgtcctgggtagcgtgaggacccacggggctgagcaggtgccacgagcccgccgcctcttcgccgcccgccgcctctcctcctctcccgcccgccgcctggccctcccctaccaggctgagcctctggctgccagaagcgcggggcctccgggagaatacgtgcggtcgcccgctccgcgtgcgcctacgccttctgctccagttgctttcccaattgagcggaaaagccggggcatgttgccggggccctgggcgggacggttgtgccctgcagcccgaagcccgccggggcaccttcccgcccacgagctgcccagtccctctgcttgcggcccctgccaacgtcccacaggacactgggtccccttggagcctccccaggcttaatgattgtccagaaggcggctataaagggagcctgggaggctgggtggaggagggagcagaaaaaacccaactcagcagatctgggaactgtgagagcggcaagcaggaactgtggtcagaggctgtgcgtcttggctggtagggcctgctcttttctaccatggcagcccagggctatggctattatcgcactgtgatcttctcagccatgtttgggggctacagcctgtattacttcaatcgcaagaccttctcctttgtcatgccatcattggtggaagagatccctttggacaaggatgatttggggttcatcaccagcagccagtcggcagcttatgctatcagcaagtttgtcagtggggtgctgtctgaccagatgagtgctcgctggctcttctcttctgggctgctcctggttggcctggtcaacatattctttgcctggagctccacagtacctgtctttgctgccctctggttccttaatggcctggcccaggggctgggctggcccccatgtgggaaggtcctgcggaagtggtttgagccatctcagtttggcacttggtgggccatcctgtcaaccagcatgaacctggctggagggctgggccctatcctggcaaccatccttgcccagagctacagctggcgcagcacgctggccctatctggggcactgtgtgtggttgtctccttcctctgtctcctgctcatccacaatgaacctgctgatgttggactccgcaacctggaccccatgccctctgagggcaagaagggctccttgaaggaggagagcaccctgcaggagctgctgctgtccccttacctgtgggtgctctccactggttaccttgtggtgtttggagtaaagacctgctgtactgactggggccagttcttccttatccaggagaaaggacagtcagcccttgtaggtagctcctacatgagtgccctggaagttgggggccttgtaggcagcatcgcagctggctacctgtcagaccgggccatggcaaaggcgggactgtccaactacgggaaccctcgccatggcctgttgctgttcatgatggctggcatgacagtgtccatgtacctcttccgggtaacagtgaccagtgactcccccaagctctggatcctggtattgggagctgtatttggtttctcctcgtatggccccattgccctgtttggagtcatagccaacgagagtgcccctcccaacttgtgtggcacctcccacgccattgtgggactcatggccaatgtgggcggctttctggctgggctgcccttcagcaccattgccaagcactacagttggagcacagccttctgggtggctgaagtgatttgtgcggccagcacggctgccttcttcctcctacgaaacatccgcaccaagatgggccgagtgtccaagaaggctgagtgaagagagtccaggttccggagcaccatcccacggtggccttccccctgcacgctctgcggggagaaaaggaggggcctgcctggctagccctgaacctttcactttccatttctgcgccttttctgtcacccgggtggcgctggaagttatcagtggctagtgaggtcccagctccctgatcctatgctctatttaaaagataacctttggccttagactccgttagctcctatttcctgccttcagacaaacaggaaacttctgcagtcaggaaggctcctgtacccttcttcttttcctaggccctgtcctgcccgcatcctaccccatccccacctgaagtgaggctatccctgcagctgcagggcactaatgacccttgacttctgctgggtcctaagtcctctcagcagtgggtgactgctgttgccaatacctcagactccagggaaagagaggaggccatcattctcactgtaccactaggcgcagttggatataggtgggaagaaaaggtgacttgttatagaagattaaaactagatttgatactgaaaaaaaaaaaaaaaaaaaaaaaaaaaaaaaaaa

SEQ ID NO: 431 - DNA, 5072 bp, Homo sapiens
ggggctgaggaggcgagggcagcggagtttcctgccctgagatagttgcagcccgctctgctgcaaccatttcaaattagagaagaaagcagttcagccggtggggctggcgggactctgaccggcccggtggcctcgccggcaacggccccgccccgctggcggcagcggcggcggcagcggctgcgcggggcctggaactggtcgggccggctggggttccgggggacaggtttgcagggtggggcccgagaggctggcgggcaggcagcagtggagccggaagggtaggcagccaggagagagagaggagctatggagagggcccgcaagttctcgggctccggcttggccatgggcttgggctccgcctccgcttcggcctggaggagggcttcgcagaggtgggcctggccgctccgctccctgcggcccggaggggatgccagagagcctcgcaagatcatcctgcacaaaggctccacaggcctgggcttcaacatcgtaggaggagaggatggagaaggcatttttgtctccttcatcctggcaggaggcccagctgacctgagtggggagctgcgcaggggagaccggatcttatcggtgaatggagtgaatctgaggaatgcaactcatgagcaggctgcagctgctctgaaacgggccggccagtcagtcaccattgtggcccagtacagacctgaagaatacagtcgctttgaatcgaagatacatgacttacgagaacaaatgatgaacagcagcatgagctctgggtctgggtccctccgaacaagtgaaaagaggtccttgtatgtcagggccctgtttgattatgatcggactcgggacagctgcctgccaagccaggggctcagcttctcttatggtgacattctgcatgtcattaatgcctctgatgatgagtggtggcaggcaaggctggtgaccccacacggagaaagtgagcagatcggtgtgatccccagtaagaagagggtggaaaagaaagaaagagctcgattgaaaactgtgaagttccatgccaggacggggatgattgagtctaacaggtcgatcaaaacgaaacgtaaaaagagtttccgcctctctcgaaagtttccattttacaagagcaaagaaaacatggcccaggagagcagcatacaggaacagggagtgacatccaacaccagtgacagcgaaagcagttccaaaggacaagaggatgctattttgtcatatgagccagtgacacggcaagaaattcactatgcaaggcctgtgatcatcctgggcccaatgaaggaccgagtcaatgatgacctgatctccgaatttccacataaatttggatcctgtgtgccacatactacccggcctcgacgtgataatgaggtggatggacaagactaccactttgtggtgtcccgagaacaaatggagaaagatattcaggacaacaagttcatcgaggcgggccaatttaatgataacctctatgggaccagcatccagtcagtgcgggcagttgcagagaggggcaagcactgcatcttagatgtttccggcaatgctatcaagagactgcagcaagcacaactttaccccattgccattttcatcaagcccaagtccattgaagcccttatggaaatgaaccgaaggcagacatatgaacaagcaaataagatctatgacaaagccatgaaactggagcaggaatttggagagtactttacagccattgtacagggtgactcactggaagagatttataacaaaatcaaacaaatcattgaggaccagtctgggcactacatttgggtcccatcccctgaaaaactctgaagaatcccctccaaccattctcttgtgaacagaagaaatcaagtccctcttccctcctccctcttcattcctgtccccatggggagaacaaatgctactgttcttgtccccttttttagatatgtcaaaaaaaattaagttttctagtcctgttctttttttttttttaagtttttgtttgtttcagtttattttttgggatgatgccatctcattcatcatgtgactgtgcccattcctgcatggacctttcccaagcgctagcacaggtgcaaaatccatcagagccattgttttcataaaaaccaagcagaagtgaagagaaaagaggaggactgatggaaagacagactctggacagctgcacggcttgtgaagtgagctaaatgcaccacatgatgagatgctcctgggcatttctccctatctgtactgctgtcttgcagctctgaacggtgcaacgtaatggcgacagaaagtatcttatttatatatagatatatatatgtaatttatataaaatatatagaaattattatatatatatattatacactctcatataatatatatatattcacacacatttgggttagaaaatctatggagacttcatcaatggtactatgttattagagaaatgctttaattttcatattccaatcagatggcatcttctatcccagctggttgggaagggattgaagatggtagcaagtgctgcactaagggcactcgcatttggtcattctcttgagagctaggaggggtcagcctgaggccggagaggaagggcttttgcctggggtgagagggtgagagacttgacctgaaagcagctgctgcccctgaggtgcagccagagtcctgtgtgcggacagagagaatggctaatgatgctccgcgtggaattgcctattgttttatgccacctgatgtgtctgcatgagaggtttcctttttgttcctttttaagctgctgttaaaccaaaaccatgttgtgctactgtgtcagccttttcattattgcaaattttacttttactatttaagtgaatgcatagaatccaatttgccaaggttctaaaggcttatgaggtcctgaaggagccaggccttgtgatggagtaggtgacacaggcctggttgtcctgtcagcagaagggaaagcaggggctgggctgagaggaggacacggagggctctgctgaggttccttcctgggttccaccaacagggacagggagtcacttgccttccagttctgtgctgggatggcgggacagcacttggcttgcttggccagctgcgtcatgagtttgatttggtttttttttttttgcagctgcttcatatgctctgctccagcccctccccaacagctggtagcttatggtttcttcaagaggaaagtagactttatgctgtacatttgagctgtagagctaagattcgcttactggtgagctgtgaaaccttgttgctttttcccagagtctgatggcagtgactgtgatcaagggaatcttcaccgccacaagtgcaggcagcaggtgtggttcaggtccccccccaccccactgtgctcctttgaagccaacgtgcctccctcgcctccatactggagggacgacgcaggggagaacagagaagtgcttggccctaggattgaggcacttgtttcctagcccgctgggttagggctggtgcaagcgaggcaatgttgaggatgctttaagcactaccagccgaatccgggaactctgttaacagttgtccaaccagcagaatgaggctaactgtataaagcatgggacccaggatgaggataaggaaaggacagcggctttccctgggcagtacaatggcttgaaggcaaaaagggataaagtgacagccgactgtgactctggtgaggaggggtgagcagggaggttgattctctgatgttaactaagtggcaaagtctcaaccgtgctcagccctccccctcccagggaagagaaacaaagattcaaagtaagcatgatactagtgggtttaccagtgtttcttccaaggagacatatattttttaataaacgatagttgcaatgaactgtggctcagagaccttcttaaagtagttgagaagggagggcgtgggcaaagcagtgggaagaacatcccaaacttttgggggccagagggctctctccttagtgatgatcagctagccgagctgggccgtcctggggatcggtacagctccctggggtggtgacaggccctttgtgaaagttgtgtgcttggtcttccaccccagccccagacactgcttcaaatagcaccaaccagatgggagtccacatctgtggtggcaaaatgctgacattttcccaagaggtacacaaggtgggagaggcctgctgtagcagaggtgtgtgttagagaaagcaggggcctgatttagtagcagagaactgggtgagaaaaatggccagagaaagtgacctgccagctaccagtgtttccgaaaatgagggtgggatgggcccatttgcagagcaggacagcagtcatccccatagccctctgaggaggggagggatgcttagagcaggcagttctgtcagttctgacgtggcaggtgccattgcaacttgtgcggaggagtcttaggaagtgctgtcataattcataaggtcaagagcaacatctggatgaatgagccacctgaaatgtgtgtgggctgagccacaggaagggtgagtcctcttgcttgtggtgctttatggtgtgcaggttgcttgctttcccacattctctcatttgcttgaaggcagcctaacaaaagggagtccccaaagagctccatgagagcttaagaaaattcatctcctgaggacaaagagaacaaagatctgtcctgtggtcacactgttgaggctctgtcttcacagctgatgttctcctagtggaggtacagctgaagaacattcagccccagcacgagaagatacagagcaacttggaaaccccaaagggagacacacccttaacactgccgtgctgtgctgtgccgtgtcctgaaggaggagagagccctatctcctcctggttttgttgctgacattgcagctgatcatgccttgactccttcatctctaacagaggaagaactgtattatcaaaccttatggtctacccatgaataaataaaatatttgttcaagcac

SEQ ID NO: 432 - DNA, 2440 bp, Homo sapiens
cttgagcgcctcttccggttaccttttcccagcgccagaggcgcctagggttggggtcctcgctcaggcacagagacccgacaccgagcggcggcttccccgggatcgagggacgcgcacgccagaggagacgaaaggaacccgggtcggaccagatcggaaccactgaccattgcccatggcggccctaggccctagcagccagaatgtcactgaatacgtcgttcgagttcctaagaatacaaccaaaaaatataacatcatggcttttaatgcagccgacaaagtcaactttgctacgtggaatcaggctcggctggagcgggacttgagcaacaagaaaatctaccaagaggaggagatgcccgaatcgggcgcgggcagtgagttcaaccgcaagcttcgggaggaggctcggaggaagaagtacggcatcgtcctcaaggagttccggcccgaggaccagccctggctgctccgggtcaacggcaaatcaggcaggaagttcaagggcatcaagaagggaggcgtaacagagaacacgtcctactacatcttcacccagtgccccgacggggccttcgaggccttccccgtgcacaactggtacaatttcacaccgctggcccggcatcgcacgctcactgccgaggaggccgaggaggagtgggagaggaggaacaaggtgctgaaccacttcagcatcatgcagcagcggcggctcaaggatcaggaccaggacgaggatgaggaggagaaggagaaacgtggccgcaggaaggcgagcgagctgcgcatccacgacctggaggacgacctggagatgtcgtccgatgccagtgatgccagtggtgaggaggggggcagagtccccaaggccaagaagaaggcgccgctggccaagggcggcaggaaaaagaagaagaagaagggttcagacgacgaggccttcgaggacagcgatgatggggacttcgagggccaagaggtggactacatgtcagacggctccagtagctcccaagaagagcctgagagcaaggccaaggcgccgcagcaggaggaggggcccaagggtgtcgatgagcagagcgacagtagtgaggagagtgaggaggagaagccgcctgaggaggacaaggaggaggaggaggagaagaaggcacccaccccgcaggagaagaagcgcaggaaagacagcagcgaggagtcggacagctcagaggagagcgacattgacagcgaggcctcctcagccttcttcatggcgaagaagaagacgccacccaagagagagcggaagccgtcgggagggagctcaaggggcaacagccgcccaggcacgcccagcgcagagggtggcagcacctcctccaccctgcgggcggctgccagcaaactcgagcaagggaagcgggtgagcgagatgcctgcagccaagcggttgcggctggacacgggaccccagagcctgtctgggaagtcgacaccccagccaccatcaggcaagacaacacccaacagcggcgacgtgcaggtgactgaggatgccgtgcgccgctacctgacacggaagcccatgaccactaaggacctgctgaaaaagttccagaccaagaagacagggctgagcagcgagcagacagtgaacgtgttggcccagatcctcaagcgactcaaccccgagcgcaagatgatcaacgacaaaatgcacttctccctcaaggagtgaggcttggtccaatacatggctctgccccccagaacttaaggctctcactgccccttcgccatcctagagtgaggctctgtccaatacatggctctgccctccagaacttcaggctctcagtgacccttcgacatcctgcttgctccctgactcccagggccccgtagttagcaattctggaaaagttaagccatctcctcctctggcccttccttctggaatcttcagatgcctgttaggccttcttattgtcctcctcctcctggctcggcctccctcacactgaccaagggcctgtgctgcccactgggtaacttctacagttctcccttccacttccctaagtctctcttcagctgtgacttatccaccacatagcccagtaagtcttcagttttggctgggcatgatggtgagcgcctgcagtcccagctacttgggaggctaagcccagttcaaggctgcagtgaactatgatggtgccactgcattccagcctgggtgacagaatgaaatcctggcacaaaaaaaaaaaagtagccaggcatggtggcgggagcctgttgtcccagctgttccgtaggctgaggcacgagattcacttgaacctgggaggtggaggttgctgtgagctgacaccacgccactgcactccagcctgggtgacagtgagactctgtctcaataaataaaaaataataataaatt

SEQ ID NO: 433 - DNA, 1731 bp, Homo sapiens; identical to SEQ ID NO: 183

SEQ ID NO: 434 - DNA, 4180 bp, Homo sapiens
gcggggaagcagcagcggccaggatgaatcccaggtgctctggagctggatggtgaaggtcggcactcttcaccctcccgagccctgcccgtctcggccccatgcccccaccagtcagccccgggccacaggcagtgagcaggcacctgggagccgaggccctgtgaccaggccaaggagacgggcgctccagggtcccagccacctgtcccccccatggagctgaggccctggttgctatgggtggtagcagcaacaggaaccttggtcctgctagcagctgatgctcagggccagaaggtcttcaccaacacgtgggctgtgcgcatccctggaggcccagcggtggccaacagtgtggcacggaagcatgggttcctcaacctgggccagatcttcggggactattaccacttctggcatcgaggagtgacgaagcggtccctgtcgcctcaccgcccgcggcacagccggctgcagagggagcctcaagtacagtggctggaacagcaggtggcaaagcgacggactaaacgggacgtgtaccaggagcccacagaccccaagtttcctcagcagtggtacctgtctggtgtcactcagcgggacctgaatgtgaaggcggcctgggcgcagggctacacagggcacggcattgtggtctccattctggacgatggcatcgagaagaaccacccggacttggcaggcaattatgatcctggggccagttttgatgtcaatgaccaggaccctgacccccagcctcggtacacacagatgaatgacaacaggcacggcacacggtgtgcgggggaagtggctgcggtggccaacaacggtgtctgtggtgtaggtgtggcctacaacgcccgcattggaggggtgcgcatgctggatggcgaggtgacagatgcagtggaggcacgctcgctgggcctgaaccccaaccacatccacatctacagtgccagctggggccccgaggatgacggcaagacagtggatgggccagcccgcctcgccgaggaggccttcttccgtggggttagccagggccgaggggggctgggctccatctttgtctgggcctcggggaacgggggccgggaacatgacagctgcaactgcgacggctacaccaacagtatctacacgctgtccatcagcagcgccacgcagtttggcaacgtgccgtggtacagcgaggcctgctcgtccacactggccacgacctacagcagtggcaaccagaatgagaagcagatcgtgacgactgacttgcggcagaagtgcacggagtctcacacgggcacctcagcctctgcccccttagcagccggcatcattgctctcaccctggaggccaataagaacctcacatggcgggacatgcaacacctggtggtacagacctcgaagccagcccacctcaatgccaacgactgggccaccaatggtgtgggccggaaagtgagccactcatatggctacgggcttttggacgcaggcgccatggtggccctggcccagaattggaccacagtggccccccagcggaagtgcatcatcgacatcctcaccgagcccaaagacatcgggaaacggctcgaggtgcggaagaccgtgaccgcgtgcctgggcgagcccaaccacatcactcggctggagcacgctcaggcgcggctcaccctgtcctataatcgccgtggcgacctggccatccacctggtcagccccatgggcacccgctccaccctgctggcagccaggccacatgactactccgcagatgggtttaatgactgggccttcatgacaactcattcctgggatgaggatccctctggcgagtgggtcctagagattgaaaacaccagcgaagccaacaactatgggacgctgaccaagttcaccctcgtactctatggcaccgcccctgaggggctgcccgtacctccagaaagcagtggctgcaagaccctcacgtccagtcaggcctgtgtggtgtgcgaggaaggcttctccctgcaccagaagagctgtgtccagcactgccctccagggttcgccccccaagtcctcgatacgcactatagcaccgagaatgacgtggagaccatccgggccagcgtctgcgccccctgccacgcctcatgtgccacatgccaggggccggccctgacagactgcctcagctgccccagccacgcctccttggaccctgtggagcagacttgctcccggcaaagccagagcagccgagagtccccgccacagcagcagccacctcggctgcccccggaggtggaggcggggcaacggctgcgggcagggctgctgccctcacacctgcctgaggtggtggccggcctcagctgcgccttcatcgtgctggtcttcgtcactgtcttcctggtcctgcagctgcgctctggctttagttttcggggggtgaaggtgtacaccatggaccgtggcctcatctcctacaaggggctgccccctgaagcctggcaggaggagtgcccgtctgactcagaagaggacgagggccggggcgagaggaccgcctttatcaaagaccagagcgccctctgatgagcccactgcccaccccctcaagccaatcccctccttgggcactttttaattcaccaaagtatttttttatcttgggactgggtttggaccccagctgggaggcaagaggggtggagactgcttcccatcctaccctcgggcccacctggccacctgaggtgggcccaggaccagctggggcgtggggagggccgtaccccaccctcagcaccccttccatgtggagaaaggagtgaaacctttagggcagcttgccccggccccggccccagccagagttcctgcggagtgaagaggggcagcccttgcttgttgggattcctgacccaggccgcagctcttgcccttccctgtccctctaaagcaataatggtcccatccaggcagtcgggggctggcctaggagatatctgagggaggaggccacctctccaagggcttctgcaccctccaccctgtcccccagctctggtgagtcttggcggcagcagccatcataggaagggaccaaggcaaggcaggtgcctccaggtgtgcacgtggcatgtggcctgtggcctgtgtcccatgacccacccctgtgctccgtgcctccaccaccactggccaccaggctggcgcagccaaggccgaagctctggctgaaccctgtgctggtgtcctgaccaccctcccctctcttgcacccgcctctcccgtcagggcccaagtccctgttttctgagcccgggctgcctgggctgttggcactcacagacctggagcccctgggtgggtggtggggaggggcgctggcccagccggcctctctggcctcccacccgatgctgctttcccctgtggggatctcaggggctgtttgaggatatattttcactttgtgattatttcactttagatgctgatgatttgtttttgtatttttaatgggggtagcagctggactacccacgttctcacacccaccgtccgccctgctcctccctggctgccctggccctgaggtgtgggggctgcagcatgttgctgaggagtgaggaatagttgagccccaagtcctgaagaggcgggccagccaggcgggctcaaggaaagggggtcccagtgggaggggcaggctgacatctgtgtttcaagtggggctcgccatgccgggggttcataggtcactggctctccaagtgccagaggtgggcaggtggtggcactgagcccccccaacactgtgccctggtggagaaagcactgacctgtcatgcccccctcaaacctcctcttctgacgtgccttttgcacccctcccattaggacaatcagtcccctcccatctgggagtccccttttcttttctaccctagccattcctggtacccagccatctgcccaggggtgccccctcctctcccatccccctgccctcgtggccagcccggctggttttgtaagatgctgggttggtgcacagtgatttttttcttgtaatttaaacaggcccagcattgctggttctatttaatggacatgagataatgttagaggttttaaagtgattaaacgtgcagactatgcaaaccag

SEQ ID NO: 435 - DNA, 2997 bp, Homo sapiens
ggactgcggtctcgggcagcaatggccgagaagcgcgacacacgggactccgaagcccagcggctccccgactccttcaaggacagccccagtaagggccttggaccttgcggatggattttggtggcgttctcattcttattcaccgttataactttcccaatctcaatatggatgtgcataaagattataaaagagtatgaaagagccatcatctttagattgggtcgcattttacaaggaggagccaaaggacctggtttgttttttattctgccatgcactgacagcttcatcaaagtggacatgagaactatttcatttgatattcctcctcaggagatcctgacaaaggattcagtgacaattagcgtggatggtgtggtctattaccgcgttcagaatgcaaccctggctgtggcaaatatcaccaacgctgactcagcaacccgtcttttggcacaaactactctgaggaatgttctgggcaccaagaatctttctcagatcctctctgacagagaagaaattgcacacaacatgcagtctactctggatgatgccactgatgcctggggaataaaggtggagcgtgtggaaattaaggatgtgaaactacctgtgcagctccagagagctatggctgcagaagcagaagcgtcccgcgaggcccgcgccaaggttattgcagccgaaggagaaatgaatgcatccagggctctgaaagaagcctccatggtcatcactgaatctcctgcagcccttcagctccgatacctgcagacactgaccaccattgctgctgagaaaaactcaacaattgtcttccctctgcccatagatatgctgcaaggaatcataggggcaaaacacagccatctaggctagtgtagagatgagcgctagccttccaagcatgaagtcggggaccaaattagcctttaactcataaagagagggtagggcttttctttttccatatgtcaattgtggtgttcccagaatgtatagcagttataaaaataggtgaaagaattgttagcttgtaaatactgagagattggtgatttatataaggtaatctgttagtcttaaaatagttaaaagtttgtatttttagattattatgtagtaggttagatccctcttgttttgacttccactgactcattctgaaccccctaagcacccaggccacaggcaagaacctgggctgtaactgccacctgacaccgctgactggctaaatgctttgcagaaagtgatgaccttacaccacaaccagcttctccaggtcatatgtgccttacctccagaagtctttttttttttttttttctgagatggagtttcactcttgttgcccaggctggagtgcaatagcatgatctcggctcactgcaacctccgcctcctgggttcaagagattctcctgcctcagcctccccagtagctgggattacaggctcatgccaccatgcccagctaatttttgtattattattattgttttttagtagagacggggtttcaccatgttggccaggctagtcacgaactcctaacctcaggtgatccacccacctctgcctccaaagtgctggattacaggctgagctaccaccctggtttggagagtcttaattaattgaaatttccctaatgttcatttattttctaaatccagccgtgtttcagaataatccttacttgagagtagccattttcttgtgtacttgtcagaactagaggaaatagccaagactaatgaaaaacattactctaacccttaaaagacttttaaattcactactagagtggtcattttaaaaatacatccatgttttaacttattttgagcctttcttttatgagtaaatgattcctccttgttctgtctttcaaaccagctaaatatttgtcacaaaagtgacttttttctcactgttgcctattttcatatatcaggttttaaatagttttaattttttaataaaatttttctctacgttctatatgcaattgttatatatctatttgaatagctgaaggactaaaatacttttttaagagataacttcaggaaaccattatattttactatctgcatgctgttaactgtggtacactgtgaaatatgttgattacaaacccattcattacatagtataaggaattcacagtatattgactatatagtgtctaatgactgggcagatactgtcaacttacaatatctatatagagaggctttaaacttaccttactcattctctatgatgtatgacttgatgctgaaagaggaagctggtcagctcctcatggacaacaaattcttagtctataatattaggagacatctctagttttgcaaatgtctgtgaatctgagcaacctggacttctgcttactggccagaaagctggcgggtgacatttgtaacatttcctctttgagactctgagttcacctagagaagtctaagcataacagctttctttcccagcacgagcctttatagctctctttagctcaaccactctgtccatccagccaatggatgtccttccctgtacccaattcaagcttattttagggaagccttgaaactaccatgtatctggctctagctgagttattgaggattgagccagtgcaacgttaaactcagtgcacttacatttgatttaaatgatggttttatctgttgtgtgaagtggttcacccttgaggaccaggagcctccatatcctgactgaaaaccttttctgagacttagagtaacagtacttttggttccttgagttctcctgtctccagatacctaaatgaccttgacttttctgccttgtgaattcgtagtccaatcagctgaaattaaatcacttgggagggacgcatagaaggagctctaggaacacagtgccagtgcagaagtttctccaggtggcctccctttccaacaatgtacataataaagtgtatgcactttcact

SEQ ID NO: 436 - DNA, 4917 bp, Homo sapiens
ggcagctcggccgactgggcccggagcggcgcggaggccgggcgctgacggtgtgtgtggaggccagtatgaagctgaaaaagcaggtgacagtgtgtggggctgccatcttctgtgtggcagtcttctcgctctacctcatgctggaccgagtgcaacacgatcccacccgacaccagaatggtgggaacttcccccggagccaaatttctgtgctgcagaaccgcattgagcagctggagcagcttttggaggagaaccatgagattatcagccatatcaaggactccgtgctggagctgacagccaacgcagagggcccgcccgccatgctgccctactacacggtcaatggctcctgggtggtgccaccggagccccggcccagcttcttctccatctccccgcaggactgccagtttgctttggggggccggggtcagaagccagagctgcagatgctcactgtgtcggaggagctgccgtttgacaacgtggatggtggtgtgtggaggcaaggcttcgacatctcctacgacccgcacgactgggatgctgaagacctgcaggtgtttgtggtgccccactctcacaatgacccaggctggatcaagacctttgacaagtactacacagagcagacccaacacatcctcaatagcatggtgtctaagctgcaggaggacccccggcggcgcttcctctgggcagaggtctccttcttcgccaagtggtgggacaacatcaatgtccaaaagagagcggcagtccgaaggctggtgggaaacgggcagctggagattgcgacaggaggctgggtgatgccagatgaggccaattcccactactttgcattgattgaccagctcatcgaaggacaccagtggctggagagaaatcttggtgcaaccccccgctctggctgggcagtggacccctttggatacagctccaccatgccttacctgctgcgccgtgccaacctcaccagcatgctgattcagagagtgcactatgccatcaagaagcactttgctgccacccacagcctagagttcatgtggaggcagacatgggactcggactccagcacagacatcttctgtcacatgatgcccttctacagctatgacgtcccccatacctgtggcccagatcccaagatctgctgccaatttgatttcaaacgcctgcctggtgggcgcatcaactgcccttggaaggtgccaccccgggccatcacagaggccaacgtggcagagagggcagccctgcttctggaccaataccggaagaagtcccagctgttccgaagcaacgtcctcctggtgcctcttggagatgacttccgatatgacaagccccaggagtgggatgcccagttcttcaactaccaacggctctttgacttcttcaacagcaggcctaacctccatgtgcaggcccagtttggcactctttctgactattttgatgccctgtacaagaggacaggggtggagccaggggcccggcctccagggtttcctgtgctgagcggggatttcttctcctatgcggaccgggaggatcattactggacaggctattacacttcccggcccttctacaagagcttagaccgagtcctggaagcccacctgcggggggcagaggttctgtacagcctggctgcagctcacgctcgccgctctggtctggctggccggtacccactgtctgatttcaccctcctgacggaagctcggcgcacattggggctcttccagcatcacgatgccatcactggcacggccaaggaggctgtggtggtggactatggggtcaggcttctgcgctcccttgtcaacctgaagcaggtcatcattcatgcagcccactatctggtgctgggggacaaggagacctaccactttgaccctgaggcgcccttcctccaagtggatgacactcgcttaagtcacgacgccctcccagagcgcacggtgatccagctggattcctcgcccaggtttgtggtcctattcaacccactggaacaggagcgattcagcatggtgtccctgctggtcaactctccccgcgtgcgtgtcctttcggaggagggtcagcccctggccgtgcagatcagcgcacactggagctctgccaccgaggcggtccctgacgtctaccaggtgtctgtgcctgtccgcctgccagccctgggcctgggcgtgctgcagctacagctgggcctggatgggcaccgcacgctgccctcctctgtgcgcatctacctgcacggccggcagctgtccgtcagcaggcacgaagcgtttcctctccgtgtcattgactctggcaccagcgacttcgccctcagcaaccgctacatgcaggtctggttctcaggccttactgggctcctcaaggggtcagggctgtgttttttggcagagcatccgaagggtggatgaggagcacgagcagcaggtggacatgcaggtccttgtctatggcacccgtacgtccaaagacaagagtggagcctacctcttcctgcccgatggcgaggcaagccctacgtccccaaggagccccccgtgctgcgtgtcactgaaggccctttcttctcagaggtggttgcgtactatgagcacattcaccaggcggtccggctttacaatctgccaggggtggaggggctgtctctggacatatcatccctggtggacatccgggactacgtcaacaaggagctggccctgcacatccatacagacatcgacagccagggtgcagccccgacggtatctgaagaagctccccctccaggccaacttctaccccatgccagtcatggcctatatccaggacgcacagaagcgcctcacgctgcacactgcccaggccctgggtgtctctagcctcaaagatggccagctggaggtgatcttggaccggcggctgatgcaggatgacaaccggggcctaggccaagggctcaaggacaacaagagaacctgcaaccgtttccgcctcctgctagagcggcgaaccgtgggcagtgaggtccaagatagccactctaccagctacccatccctcctcagccacctgacctccatgtacctgaacgccccggcgctcgctctgcctgtagccaggatgcagctcccaggccctggtctgcgctcatttcatcctctggcttcctcactgccctgtgacttccacctgctcaacctacgtacgctccaggctgaggaggacaccctaccctcggcggagaccgcactcatcttacaccgcaagggttttgactgcggcctggaggccaagaacttgggcttcaactgcaccacaagccaaggcaaggtagccctgggcagccttttccatggcctggatgtggtattccttcagccaacctccttgacgttactgtaccctctggcctccccgtccaacagcactgacgtctatttggagcccatggagattgctacctttcgcctccgcttgggttagggcttcttgtggcctgaagagaaagttcattcacagagactgcctcttaacatgaagatcattggacaagccacacgggtatcccatcccgatctgcctcccagaactgtgacacactgggctctgccctcattttctgtttattgctgctgctgtgttttcggcgcaacccacaaacccagtgatgggtaaatagggcagacgccagtgagatcagggagagaaggcccttggtcagagtgggcagtgccaggctctgctttgggttgtgagtggacacccaactgggcacaggctcaggcacccatcctttttccaaacagggatatagaagtggtggaagcagacagaagaggtaagggaggctaagtgggtaacagcccagcatcagggtcactgtggcaacagcaggctctaggggaatcctgtggttatgtagagactccatgtcctggtgtgatgagcaggatcagagtgactctgggaggacaggggtggggacccagagttagcagtggggatggagcagtagaaggaatcactgtttctcctaggagtctgaaggcctcgctgctttctgtgatggctttgcagtaagtgccgcctggcctgcatgcattggctaacaggctgcagaatggcaggaaggactcgctagagattgtcatggccagagatcataggtcacttcaggtagcaagacccctggcaaactgggcacttggcctatgtactgatttgtgggatggtggcaggggtgtggggtccttcaccctgcctgaattctctttggcttctgtgctctgtatgctgctgtccccaagggctctttcttattatggcagggagtggggattggtcctactttctttctctggaaaggaaagcctccaagactccatgtgcttgggcagcttgagaaggcgttcagcaccacgcctagcaggcagaccttgaagcctcacctttagtctatctgcagaggtattcagttcctggcacaggggactaggggcatgtagagtatatgaggaggcagtatggctgtgcaggagccttcatttcagcttcaattaatagggaagaatttatgatagctctatagatgctgaaaaggtatttcgtaagatttaaaatccatcccttattaaaactcttagtaaattaagtctggaaagaaacaccctaatctagataaaggtctgtttcagaaaccaacagtgatggcattctaaagagtcagacgccacaggcattcccattaaagtcagaaactagccaagggcaagctattattcagcagtgtcccggcactactaacccctgcaacaagccagatgaggaacataaggaagaattataattgtcattatttgtagacaataaaactgcctacctgtaaaa

SEQ ID NO: 437 - DNA, 3178 bp, Homo sapiens
  misc_feature (990)..(990): N may be C, G, T or A
  misc_feature (1015)..(1015): N may be C, G, T or A
  misc_feature (1039)..(1039): N may be C, G, T or A
  misc_feature (1063)..(1063): N may be C, G, T or A
  misc_feature (1065)..(1065): N may be C, G, T or A
  misc_feature (1123)..(1123): N may be C, G, T or A
  misc_feature (1559)..(1559): N may be C, G, T or A
  misc_feature (1564)..(1565): N may be C, G, T or A
  misc_feature (1587)..(1587): N may be C, G, T or A
  misc_feature (1590)..(1590): N may be C, G, T or A
  misc_feature (1596)..(1596): N may be C, G, T or A
  misc_feature (1637)..(1637): N may be C, G, T or A
  misc_feature (1645)..(1645): N may be C, G, T or A
  misc_feature (1649)..(1650): N may be C, G, T or A
  misc_feature (1657)..(1657): N may be C, G, T or A
  misc_feature (1665)..(1665): N may be C, G, T or A
  misc_feature (1691)..(1691): N may be C, G, T or A
  misc_feature (1703)..(1703): N may be C, G, T or A
  misc_feature (1722)..(1722): N may be C, G, T or A
  misc_feature (1737)..(1737): N may be C, G, T or A
  misc_feature (1740)..(1740): N may be C, G, T or A
  misc_feature (1755)..(1755): N may be C, G, T or A
  misc_feature (1759)..(1759): N may be C, G, T or A
  misc_feature (1763)..(1764): N may be C, G, T or A
  misc_feature (1770)..(1770): N may be C, G, T or A
  misc_feature (1774)..(1775): N may be C, G, T or A
  misc_feature (1933)..(1933): N may be C, G, T or A
  misc_feature (1993)..(1993): N may be C, G, T or A
  misc_feature (1954)..(1954): N may be C, G, T or A
  misc_feature (1967)..(1968): N may be C, G, T or A
  misc_feature (1993)..(1993): N may be C, G, T or A
  misc_feature (1997)..(1997): N may be C, G, T or A
  misc_feature (2168)..(2168): N may be C, G, T or A
  misc_feature (2189)..(2189): N may be C, G, T or A
  misc_feature (2207)..(2207): N may be C, G, T or A
  misc_feature (2210)..(2210): N may be C, G, T or A
  misc_feature (2247)..(2248): N may be C, G, T or A
  misc_feature (2394)..(2394): N may be C, G, T or A
  misc_feature (2467)..(2467): N may be C, G, T or A
  misc_feature (2576)..(2576): N may be C, G, T or A
  misc_feature (2580)..(2580): N may be C, G, T or A
  misc_feature (2582)..(2582): N may be C, G, T or A
  misc_feature (3053)..(3053): N may be C, G, T or A
  misc_feature (3148)..(3148): N may be C, G, T or A
agttgagcgcagtcgccgctccagtctatccggcactaggaacagccccgggggcgagacggtccccgccatgtctgcggccatgagggagaggttcgaccggttcctgcacgagaagaactgcatgactgaccttctggccaagctcgaggccaaaaccggcgtgaacaggagcttcatcgctcttggtgtcatcggactggtggccttgtacctggtgttcggttatggagcctctctcctctgcaacctgataggatttggctacccagcctacatctcaattaaagctatagagagtcccaacaaagaagatgatacccagtggctgacctactgggtagtgtatggtgtgttcagcattgctgaattcttctctgatatcttcctgtcatggttccccttctactacatgctgaagtgtggcttcctgttgtggtgcatggccccgagcccttctaatggggctgaactgctctacaagcgcatcatccgtcctttcttcctgaagcacgagtcccagatggacagtgtggtcaaggaccttaaagacaagtccaaagagactgcagatgccatcactaaagaagcgaagaaagctaccgtgaatttactgggtgaagaaaagaagagcacctaaaccagactaaaccagactggatggaaacttcctgccctctctgtaccttcctactggagcttgatgttatattagggactgtggtataattattttaataatgttgccttggaaacattttgagatattaaagattggaatgtgttgtaagtttctttgcttacttttactgtctatatatatagggagcactttaaacttaatgcagtgggcagtgtccacgtttttggaaaatgtattttgcctctgggtaggaaaagatgtatgttgctatcctgcaggaaatataaacttaaaataaaattatataccccacaggctgtgtactttactgggctctccctgcacgnattttctctgtagttacatttaggntaatctttatggttctacttcctntaatgtacaattttatataattcngnaatgtttttaatgtatttgtgcacatgtacatatggaaatgttactgtctgactacancatgcatcatgctcatggggagggagcaggggaaggttgtatgtgtcatttataacttctgtacagtaagaccacctgcaacaagctggaggaaccattgtgctggtgtggtctactaaataatactttaggaaatacgtgattaatatgcaagtgaacaaagtgagaaatgaaatcgaatggagattggcctggttgtttccgtagtatatggcatatgaataccaggatagctttataaagcagttagttagttagttactcactctagtgataaatcgggaaatttacacacacacacacacacacacacacacacacacacacacacacacacacacagagtaccctgtaactctcaattccctgaaaaactagtaatactgtcttatctgctataaactttacatatttgtctattgtcaagatgctacantggannccatttctggttttatcttcanagnggaganacatgttgatttagtcttctttcccaatcttcttttttaanccagtttnaggnncttctgnagatttgnccacctctgattacatgtatgttctngtttgtatcatnagcaacaacatgctaatgncgacacctagctctnagngcaattctgggagantganaggnngtatanagtnncccataatctgcttggcaatagttaagtcaatctatcttcagtttttctctggcctttaaggtcaaacacaagaggcttccctagtttacaagtcagagtcacttgtagtccatttaaatgccctcatccgtattctttgtgttgataagctgcacangactacatagtaagtacagancagtaaagttaanncggatgtctccattgatctgccaantcgntatagagagcaatttgtctggactagaaaatctgagttttacaccatactgttaagagtccttttgaattaaactagactaaaacaagtgtataactaaactaacaagattaaatatccagccagtacagtattttttaaggcaaataaagatgattagctcaccttgagntaacaatcaggtaagatcatnacaatgtctcatgatgtnaanaatattaaagatatcaatactaagtgacagtatcacnnctaatataatatggatcagagcatttattttggggaggaaaacagtggtgattaccggcattttattaaacttaaaactttgtagaaagcaaacaaaattgttcttgggagaaaatcaacttttagattaaaaaaattttaagtanctaggagtatttaaatccttttcccataaataaaagtacagttttcttggtggcagaatgaaaatcagcaacntctagcatatagactatataatcagattgacagcatatagaatatattatcagacaagatgaggaggtacaaaagttactattgctcataatgacttacaggctaaaantagntntaaaatactatattaaattctgaatgcaatttttttttgttcccttgagaccaaaatttaagttaactgttgctggcagtctaagtgtaaatgttaacagcaggagaagttaagaattgagcagttctgttgcatgatttcccaaatgaaatactgccttggctagagtttgaaaaactaattgagcctgtgcctggctagaaaacaagcgtttatttgaatgtgaatagtgtttcaaaggtatgtagttacagaattcctaccaaacagcttaaattcttcaagaaagaattcctgcagcagttattcccttacctgaaggcttcaatcatttggatcaacaactgctactctcgggaagactcctctactcacagctgaagaaaatgagcacacccttcacactgttatcacctatcctgaagatgtgatacactgaatggaaataaatagatgtaaataaaattgagntctcatttaaaaaaaaccatgtgcccaatgggaaaatgacctcatgttgtggtttaaacagcaactgcacccactagcacagcccattgagctancctatatatacatctctgtcagtgcccctc

SEQ ID NO: 438 - DNA, 3945 bp, Homo sapiens
cgtccacccgcccagggagagtcagacctgggggggcgagggccccccaaactcagttcggatcctacccgagtgaggcggcgccatggagctccgggtgctgctctgctgggcttcgttggccgcagctttggaagagaccctgctgaacacaaaattggaaactgctgatctgaagtgggtgacattccctcaggtggacgggcagtgggaggaactgagcggcctggatgaggaacagcacagcgtgcgcacctacgaagtgtgtgaagtgcagcgtgccccgggccaggcccactggcttcgcacaggttgggtcccacggcggggcgccgtccacgtgtacgccacgctgcgcttcaccatgctcgagtgcctgtccctgcctcgggctgggcgctcctgcaaggagaccttcaccgtcttctactatgagagcgatgcggacacggccacggccctcacgccagcctggatggagaacccctacatcaaggtggacacggtggccgcggagcatctcacccggaagcgccctggggccgaggccaccgggaaggtgaatgtcaagacgctgcgtctgggaccgctcagcaaggctggcttctacctggccttccaggaccagggtgcctgcatggccctgctatccctgcacctcttctacaaaaagtgcgcccagctgactgtgaacctgactcgattcccggagactgtgcctcgggagctggttgtgcccgtggccggtagctgcgtggtggatgccgtccccgcccctggccccagccccagcctctactgccgtgaggatggccagtgggccgaacagccggtcacgggctgcagctgtgctccggggttcgaggcagctgaggggaacaccaagtgccgagcctgtgcccagggcaccttcaagcccctgtcaggagaagggtcctgccagccatgcccagccaatagccactctaacaccattggatcagccgtctgccagtgccgcgtcgggtacttccgggcacgcacagacccccggggtgcaccctgcaccacccctccttcggctccgcggagcgtggtttcccgcctgaacggctcctccctgcacctggaatggagtgcccccctggagtctggtggccgagaggacctcacctacgccctccgctgccgggagtgccgacccggaggctcctgtgcgccctgcgggggagacctgacttttgaccccggcccccgggacctggtggagccctgggtggtggttcgagggctacgtccggacttcacctatacctttgaggtcactgcattgaacggggtatcctccttagccacggggcccgtcccatttgagcctgtcaatgtcaccactgaccgagaggtacctcctgcagtgtctgacatccgggtgacgcggtcctcacccagcagcttgagcctggcctgggctgttccccgggcacccagtggggcgtggctggactacgaggtcaaataccatgagaagggcgccgagggtcccagcagcgtgcggttcctgaagacgtcagaaaaccgggcagagctgcgggggctgaagcggggagccagctacctggtgcaggtacgggcgcgctctgaggccggctacgggcccttcggccaggaacatcacagccagacccaactggatgagagcgagggctggcgggagcagctggccctgattgcgggcacggcagtcgtgggtgtggtcctggtcctggtggtcattgtggtcgcagttctctgcctcaggaagcagagcaatgggagagaagcagaatattcggacaaacacggacagtatctcatcggacatggtactaaggtctacatcgaccccttcacttatgaagaccctaatgaggctgtgagggaatttgcaaaagagatcgatgtctcctacgtcaagattgaagaggtgattggtgcaggtgagtttggcgaggtgtgccgggggcggctcaaggccccagggaagaaggagagctgtgtggcaatcaagaccctgaagggtggctacacggagcggcagcggcgtgagtttctgagcgaggcctccatcatgggccagttcgagcaccccaatatcatccgcctggagggcgtggtcaccaacagcatgcccgtcatgattctcacagagttcatggagaacggcgccctggactccttcctgcggctaaacgacggacagttcacagtcatccagctcgtgggcatgctgcggggcatcgcctcgggcatgcggtaccttgccgagatgagctacgtccaccgagacctggctgctcgcaacatcctagtcaacagcaacctcgtctgcaaagtgtctgactttggcctttcccgattcctggaggagaactcttccgatcccacctacacgagctccctgggaggaaagattcccatccgatggactgccccggaggccattgccttccggaagttcacttccgccagtgatgcctggagttacgggattgtgatgtgggaggtgatgtcatttggggagaggccgtactgggacatgagcaatcaggacgtgatcaatgccattgaacaggactaccggctgcccccgcccccagactgtcccacctccctccaccagctcatgctggactgttggcagaaagaccggaatgcccggccccgcttcccccaggtggtcagcgccctggacaagatgatccggaaccccgccagcctcaaaatcgtggcccgggagaatggcggggcctcacaccctctcctggaccagcggcagcctcactactcagcttttggctctgtgggcgagtggcttcgggccatcaaaatgggaagatacgaagaaagtttcgcagccgctggctttggctccttcgagctggtcagccagatctctgctgaggacctgctccgaatcggagtcactctggcgggacaccagaagaaaatcttggccagtgtccagcacatgaagtcccaggccaagccgggaaccccgggtgggacaggaggaccggccccgcagtactgacctgcaggaactccccaccccagggacaccgcctccccattttccggggcagagtggggactcacagaggcccccagccctgtgccccgctggattgcactttgagcccgtggggtgaggagttggcaatttggagagacaggatttgggggttctgccataataggaggggaaaatcaccccccagccacctcggggaactccagaccaagggtgagggcgcctttccctcaggactgggtgtgaccagaggaaaaggaagtgcccaacatctcccagcctccccaggtgcccccctcaccttgatgggtgcgttcccgcagaccaaagagagtgtgactcccttgccagctccagagtgggggggctgtcccagggggcaagaaggggtgtcagggcccagtgacaaaatcattggggtttgtagtcccaacttgctgctgtcaccaccaaactcaatcatttttttcccttgtaaatgcccctcccccagctgctgccttcatattgaaggtttttgagttttgtttttggtcttaatttttctccccgttccctttttgtttcttcgttttgtttttctaccgtccttgtcataactttgtgttggagggaacctgtttcactatggcctcctttgcccaagttgaaacaggggcccatcatcatgtctgtttccagaacagtgccttggtcatcccacatccccggaccccgcctgggacccccaagctgtgtcctatgaaggggtgtggggtgaggtagtgaaaagggcggtagttggtggtggaacccagaaacggacgccggtgcttggaggggttcttaaattatatttaaaaaagtaactttttgtataaataaaagaaaatgggacgtgtcccagctccaggggt

SEQ ID NO: 439 - DNA, 2882 bp, Homo sapiens
ctctcgcactcacatgctgtcgtgctcgctcacataccgttgcacactcacatgctctcacacactctcacggtgaaatctgtgcctgccaccacactcaggttgcgatgtgtgtttcacttttagctcctctaaggttttactcaccctggctccaccaaactggattttaccatagtctatacttaaatactgttcatctcttcttctacacaagtattaagaatttacctgcctgcaagttattggaatatcccgggcaaaagcaaataaaactttcccttttcccttgttcgacaccccctcatcagtgacccccacgacacgaccccaccaccctatctggcttggcatgtgatgcttcaggaagggcacagggtttccacggctcctgttaccctcttaagcctcagaaaacattggcacaggcagagaggagagctgtcatctgagtctctctgtgggatcctgggctcttagggaaaggccagacagggaggggcgggagagatttctgtggcctccaagattcctgggaaggcgaagtctggatttccttggagaggaaggagggcttagaccagccacataattagggtgcagtagacaaacagaaatcatttcttttggtccctcatctgcctcaaggctgtgtttgctccacatggccgcacaggcacttgcgtctgtgccctttggggctggcagagatggaggagaaagccttaagcaccatctctcctgattagcgctccacgcagcttctcttcacagcccctcccacacactgtgtcccactactcagacacatgggccgtgggcacagagggaaagggaccttgggaagaatagggagccaagccactcttcaccctcccaggtgtcgcccatagtggggcacatggggacacggtggccactcaccccctgccactgagtcccacagtgcagctgggcctgtggtcagatgccacagggacaccatagcacccgtagagtgtgtcatttccttggtgcacgagggccagatgatgtccccagaggctcactggcttcccacagcacagagggacctggcactgctaccctaagatggaattgttaaaactacctccatttttatttttaaaagtatgatgtcaatgcataaaataaaaattgctttctgtcagatgcttctttattcaagcccctaaagaaatgttttcttgcctaagacagctcatattaaaatgtctaaagcccaagagaagtctaataaatttcagctttatgactttgtttactctgggtgtagaaaaagaattcttttatacgtagcctagtttccagaacttccagggtcaaaagttaacaaatttggggaaaacagaagagaaaagatagcatacagtattctgttttcctattaaaatgaggaaaacaaaggagtcatcagaactataatttacgggaaagtgtgcagacatccatctgcttttattgaaaaaataccctgcagatgttgggcctaattatgaatcctccattttcttgatgaaaaactttagtggcatctcaatctctgatcggtaaactgggtgtcgtagcacttacaaaatagaattatttcattgatctttagccatctattatttttttgtagatgagagagcattcagcatgaaggctgtttctatctgaatactaaatgttggtttcattcccacaggttcacagcaaacaggattcctaaatgcccttaaggacagtcctgcaagcgtcctggaggctgtggtgtgcttcttctctgtctggtccatcgttggcctctcaggattccacacctacttgatcagctccaaccagacaacaaatgaggacattaaaggatcctggtcaaataaaagaggtaaagaaaattacaatccctacagctacggaaatatctttaccaactgctgtgttgccctgtgtgggcccatctcaccaagcctgatcgacagaagagggtacatccagcccgacacgccgcagccagcagcaccctccaatggcatcaccatgtacggggccacgcagtcacagagtgacatgtgcgaccaagaccagtgcattcagagcaccaaattcgttttgcaggctgcagccacgcccctgctgcagagcgagcccagcctcaccagcgacgagctgcacctgcccgggaagcctggcctgggcacgccctgcgccagcctcacactgggcccgcccacaccgcccgcctccatgcccaacctcgccgaggccacgctcgcggacgtgatgccccggaaagatgagcacatgggccaccagttcctgacgcccgatgaggcgccctcgccccccaggctactggcggcgggcagccccctggcgcacagccgcaccatgcacgtgctgggcctggccagccaggactccctgcatgaggactctgtgcgcggcctggtgaagctcagctccgtgtgacccacatggccccaggccgggggacaccagaggctcctccatgggcagcaggagtgagcggaggggtgtgtcccacagcgactttcccagccaatgccacggtggagatgacagccccaggtctggggtacagagaccacttaggatagcacagggtggctggccccggatgctgagagcttggtttcatttgaattttcttccccaacctgagtgctttgacaacaatggaaatagagaagtggctgctttcttttggtgaccctccaggggtggaatcggagtgtgtctgcccgcccttgtgacagacacacggaaggcttctgacgcttgtggccagactgcaattgcacttacgtgttatgctactaatatttgaaacagacctgccattccatttgttaatt

SEQ ID NO: 440 - DNA, 1524 bp, Homo sapiens; identical to SEQ ID NO: 159

SEQ ID NO: 441 - DNA, 1251 bp, Homo sapiens
acgccgcctgggtcccagtccccgtcccatcccccggcggcctaggcagcgtttccagccccgagaactttgttctttttgtcccgccccctgcgcccaaccgcctgcgccgccttccggcccgagttctggagactcaacatgaagctaccggccagggttttctttactctggggtcccggctgccctgtggcctcgctcctcggaggtttttcagttatgggacaaaaatattatatcaaaacactgaagctttgcaatctaaattcttttcacctcttcaaaaagcgatgctaccacctaatagttttcaaggaaaagtggcattcattactgggggaggtactggccttggtaaaggaatgacaactcttctgtccagcctaggtgctcagtgcgtgatagccagccggaagatggatgttttgaaagctaccgcagaacaaatttcttctcaaactggaaataaggttcatgcaattcagtgtgatgtgagggatcctgatatggttcaaaacactgtgtcagaactgatcaaagttgcaggacatcctaatattgtgataaacaatgcagcagggaattttatttctcctactgaaagactttctcctaatgcttggaaaaccataactgacatagttctaaatggcacagccttcgtgacactagaaattggaaaacaactaattaaagcacagaaaggagcagcatttctttctattactactatctatgctgagactggttcaggttttgtagtaccaagtgcttctgccaaagcaggtgtggaagccatgagcaagtctcttgcagctgaatggggtaaatatggaatgcgattcaatgtgattcaaccagggcctataaaaaccaaaggtgcctttagccgtctggacccaactggaacatttgagaaagaaatgattggcagaattccctgtggtcgcctggggactgtagaagaactcgcaaatcttgctgctttcctttgtagtgattatgcttcttggattaatggagcagtcattaaatttgacggtggagaggaagtacttatttcaggggaattcaacgacctgagaaaggtcaccaaggagcagtgggacaccatagaagaactcatcaggaagacaaaaggttcctaagaccactttggccttcatcttggttacagaaaagggaatagaaatgaaacaaattatctctcatcttttgactatttcaagtctaataaattcttaattaac

SEQ ID NO: 442 - DNA, 729 bp, Homo sapiens
cggacgcgtgggcggaacacgctgggaggagggtggaaggcaacctcggggaaactgggaaaggcggcctggacttcgggaacaccgcgtacctgcgggggcacagccccacccgagcgaacgggctccaaaggggaggtcccgcggtgcgcaccgcgcagagctcagggggtggtgcgcccggcccttctgcggcgcacagcccagcccaggaacgcgggcggtgcggactcagcgggccgggtgcaggcgcggagctgggcctctgcgcccggcccgacctccgtctataaatagagcagccagttgcagggctccattctgctttccaactgcctgactgcttgttcgtctcactggtgtgagctccagcatcccctttgctcgaaatggaccccaactgctcttgcgccactggtggctcctgcacgtgcgccggctcctgcaagtgcaaagagtgcaaatgcacctcctgcaagaagagctgctgttcctgctgccccgtgggctgtgccaagtgtgcccagggctgcgtctgcaaaggggcatcggagaagtgcagctgctgtgcctgatgtgggaacagctcttctcccagatgtaaatagaacaacctgcacaacctggatttttttaaaaatacaacactgagccatttgctgcatttctttttatactaaatatgtgactgacaataaaaacaattttgactttaaaaaaaaaaaaaaa

SEQ ID NO: 443 - DNA, 3637 bp, Homo sapiens
accacagaaaactcctgtatgttctattgatgggagcactcccatcactaaatcaacaggtgattgggcagaagcatctctccagcaagaaaatgctattactggaaaacctgtacctgactctttgaattccacaaaagaattcagtatcaaaggtgtgcaaggcaatatgcagaaacaggatgacacacttgcagaattacctggatctccacctgagaaatgtgactcgttgggttctggagtggccacagtgaaagtggctttacctgatgaccacctgaaagatgaaatggactggcagagctctgcattgggagaaatcacagaagctgatagttctggtgagtctgatgacacagtaatagaggacatcacagcagatacatcatttgaaaataacaaaattcaggctgaaaaacctgtttccattccaagtgctgttgtaaaaacaggtgaaagagaaatcaaagagattcccagttgtgagagagaagaaaaaacatctaaaaactttgaagaattggtcagtgactctgagctgcatcaagatcagcctgatattcttggaaggagtccagctagtgaggcagcatgttcaaaagtacccgatacgaatgtctccttagaagatgtgagtgaagttgctcctgaaaagcctattactactgagaaccccaaacttccttcaacagtgtctccaaatgtttttaatgagacagaattctcattaaatgtgacaacatctgcctatttggagtcattacatgggaaaaatgttaaacatatagatgattcctccccagaggacctgatagcagcctttacagaaaccagagataaaggaatagtagatagtgaaagaaatgcttttaaagcaatatcagagaagatgacagactttaaaacaactcctcctgtagaagtcttacatgaaaatgagtccggtggttctgaaattaaagacattggaagcaaatacagtgaacaaagcaaagaaacaaatggaagtgagcctctaggtgttttccctacccaaggtactccagtagcatctcttgacttagaacaagaacagctcacaattaaggctcttaaagaattaggtgaaagacaggttgagaagtcaacttctgcacagcgtgacgcagaattgccttctgaagaagtactgaagcaaactttcacatttgctccagaatcttggccacagagatcatatgacatcctagaacgtaatgtcaagaatggatctgatcttgggatttcccagaagcccatcactatcagagaaactactagggtagatgctgtttccagccttagcaagactgaattggtaaaaaagcatgtcctagcaagacttctgacagacttctcagtgcacgatctgattttctggagagatgtgaagaagactgggtttgtctttggcaccacgctgatcatgctgctttccctggcagctttcagtgtcatcagtgtggtttcttacctcatcctggctcttctctctgtcaccatcagcttcaggatctacaagtccgtcatccaagctgtacagaagtcagaagaaggccattcattcaaagcctacctggacgtagacattactctgtcctcagaagctttccataattacatgaatgctgccatggtgcacatcaacagggccctgaaactcattattcgtctctttctggtagaagatctggttgactccttgaagctggctgtcttcatgtggctgatgacctatgttggtgctgtttttaacggaatcacccttctaattcttgctgaactgctcattttcagtgtcccgattgtctatgagaagtacaagacccagattgatcactatgttggcatcgcccgagatcagaccaagtcaattgttgaaaagatccaagcaaaactccctggaatcgccaaaaaaaaggcagaataagtacatggaaaccagaaatgcaacagttactaaaacaccatttaatagttataacgtcgttacttgtactatgaaggaaaatactcagtgtcagcttgagcctgcattccaagcttttttttttaatttggtgttttctcccatcctttccctttaaccctcagtatcaagcacaaaaattgatggactgataaaagaactatcttagaactcagaagaagaaagaatcaaattcataggataagtcaataccttaatggtggtagagcctttacctgtagcttgaaaggggaaagattggaggtaagagagaaaatgaaagaacacctctgggtccttctgtccagttttcagcactagtcttactcagctatccattatagttttgcccttaagaagtcatgattaacttatgaaaaaattatttggggacaggagtgtgataccttccttggtttttttttgcagccctcaaatcctatcttcctgccccacaatgtgagcagctacccctgatactccttttctttaatgatttaactatcaacttgataaataacttataggtgatagtgataattcctgattccaagaatgccatctgataaaaaagaatagaaatggaaagtgggactgagagggagtcagcaggcatgctgcggtggcggtcactccctctgccactatccccagggaaggaaaggctccgccatttgggaaagtggtttctacgtcactggacaccggttctgagcattagtttgagaactcgttcccgaatgtgctttcctccctctcccctgcccacctcaagtttaataaataaggttgtacttttcttactataaaataaatgtctgtaactgctgtgcactgctgtaaacttgttagagaaaaaaataacctgcatgtgggctcctcagttattgagtttttgtgatcctatctcagtctgggggggaacattctcaagaggtgaaatacagaaagcctttttttcttgatcttttcccgagattcaaatctccgattcccatttgggggcaagtttttttcttcaccttcaatatgagaattcagcgaacttgaaagaaaaatcatctgtgagttccttcaggttctcactcatagtcatgatccttcagagggaatatgcactggcgagtttaaagtaagggctatgatatttgatggtcccaaagtacggcagctgcaaaaagtagtggaaggaaattgtctacgtgtcttggaaaaattagttaggaatttggatgggtaaaaggtacccttgccttactccatcttattttcttagccccctttgagtgttttaactggtttcatgtcctagtaggaagtgcattctccatcctcatcctctgccctcccaggaagtcagtgattgtctttttgggcttcccctccaaaggaccttctgcagtggaagtgccacatccagttcttttcttttgttgctgctgtgtttagataattgaagagatctttgtgccacacaggatttttttttttttttaaagaaaaacctatagatgaaaaattactaatgaaactgtgtgtacgtgtctgtgcgtgcaacataaaaatacagtagcacctaaggagcttgaatcttggttcctgtaaaatttcaaattgatgtggtattaataaaaaaaaaaaaaacac

SEQ ID NO: 444 - DNA, 1722 bp, Homo sapiens
ggggaaaagagctaggaaagagctgcaaagcagtgtgggctttttccctttttttgctccttttcattacccctcctccgttttcacccttctccggacttcgcgtagaacctgcgaatttcgaagaggaggtggcaaagtgggagaaaagaggtgttagggtttggggtttttttgtttttgtttttgttttttaatttcttgatttcaacattttctcccaccctctcggctgcagccaacgcctcttacctgttctgcggcgccgcgcaccgctggcagctgagggttagaaagcggggtgtattttagattttaagcaaaaattttaaagataaatccatttttctctcccacccccaacgccatctccactgcatccgatctcattatttcggtggttgcttgggggtgaacaattttgtggctttttttcccctataattctgacccgctcaggcttgagggtttctccggcctccgctcactgcgtgcacctggcgctgccctgcttcccccaacctgttgcaaggctttaattcttgcaactgggacctgctcgcaggcaccccagccctccacctctctctacatttttgcaagtgtctgggggagggcacctgctctacctgccagaaattttaaaacaaaaacaaaaacaaaaaaatctccgggggccctcttggcccctttatccctgcactctcgctctcctgccccaccccgaggtaaagggggcgactaagagaagatggtgttgctcaccgcggtcctcctgctgctggccgcctatgcggggccggcccagagcctgggctccttcgtgcactgcgagccctgcgacgagaaagccctctccatgtgcccccccagccccctgggctgcgagctggtcaaggagccgggctgcggctgctgcatgacctgcgccctggccgaggggcagtcgtgcggcgtctacaccgagcgctgcgcccaggggctgcgctgcctcccccggcaggacgaggagaagccgctgcacgccctgctgcacggccgcggggtttgcctcaacgaaaagagctaccgcgagcaagtcaagatcgagagagactcccgtgagcacgaggagcccaccacctctgagatggccgaggagacctactcccccaagatcttccggcccaaacacacccgcatctccgagctgaaggctgaagcagtgaagaaggaccgcagaaagaagctgacccagtccaagtttgtcgggggagccgagaacactgcccacccccggatcatctctgcacctgagatgagacaggagtctgagcagggcccctgccgcagacacatggaggcttccctgcaggagctcaaagccagcccacgcatggtgccccgtgctgtgtacctgcccaattgtgaccgcaaaggattctacaagagaaagcagtgcaaaccttcccgtggccgcaagcgtggcatctgctggtgcgtggacaagtacgggatgaagctgccaggcatggagtacgttgacggggactttcagtgccacaccttcgacagcagcaacgttgagtgatgcgtccccccccaacctttccctcaccccctcccacccccagccccgactccagccagcgcctccctccaccccaggacgccactcatttcatctcatttaagggaaaaatatatatctatctatttgaggaaaaaaaaaaaaaaaaaaaa
